(19) United States
(12) Patent Application Publication
(10) Pub. No.: US 2008/0199493 A1
(43) Pub. Date: Aug. 21, 2008

(54) Siv and Hiv Vaccination Using Rhcmv- and Hcmv-Based Vaccine Vectors

(76) Inventors: Louis J. Picker, Portland, OR (US); Michael Jarvis, Portland, OR (US); Jay A. Nelson, Tualatin, OR (US)

Correspondence Address: KLARQUIST SPARKMAN, LLP, 121 SW SALMON STREET, SUITE 1600, PORTLAND, OR, 97204, US

(21) Appl. No.: 11/597,457

(22) PCT Filed: May 25, 2005
(86) PCT No.: PCT/US05/18594

§ 371 Date: Apr. 28, 2008

Related U.S. Application Data
(60) Provisional application No. 60/574,493, filed on May 25, 2004.

(51) Int. Cl. A61K 39/21; C12N 15/63; A61P 31/18

(52) U.S. Cl. 424/208.1; 435/320.1

(57) ABSTRACT

Particular aspects provide for use of the β-herpesvirus Cytomegalovirus (CMV: e.g., RhCMV and HCMV) as a uniquely evolved “vector” for safely initiating and indefinitely maintaining high level cellular and humoral immune responses (against, e.g., HIV, SIV, TB, etc.). Particular aspects provide a method for treatment or prevention of, e.g., HIV, SIV or TB, comprising infection of a subject in need thereof with at least one recombinant CMV-based vector (e.g., HCMV or RhCMV) comprising an expressible HIV/SIV/TB antigen or a variant or fusion protein thereof. In particular embodiments of the method, infection is of an immunocompetent, HCMV or RhCMV seropositive subject. Additional aspects provide for RhCMV- and HCMV-based vaccine vectors, and versions thereof with suicide or safety means. Further aspects provide pharmaceutical compositions comprising the inventive CMV-based vaccine vectors.

### CROSS-REFERENCE TO RELATED APPLICATIONS

[0001] This application claims the benefit of priority to U.S. Provisional Patent Application Ser. No. 60/574,493, filed 25 May 2004, and entitled CYTOMEGALOVIRUS AS A VACCINE VECTOR, and which is incorporated by reference herein in its entirety.

### STATEMENT REGARDING FEDERALLY-SPONSORED RESEARCH

[0002] This work was partially funded by ______, and the United States government has, therefore, certain rights to the present invention.

### SEQUENCE LISTING

[0003] A Sequence Listing, pursuant to 37 C.F.R. § 1.52(e)(5), has been provided on compact disc (1 of 1) as a 2.62 MB text file, entitled “49321-138 Sequence Listing.txt,” and which is incorporated by reference herein in its entirety.

### FIELD OF THE INVENTION

[0004] Aspects of the present invention relate generally to protection against SIV, HIV, TB and the like, and more particularly to novel vaccine vectors, based on RhCMV and HCMV, for protection against SIV, HIV, TB and the like.

### BACKGROUND

[0005] The HIV epidemic. The human immunodeficiency virus (HIV) epidemic likely comprises the single most serious threat to public health in modern times (arguably in recorded history). The worldwide toll from this virus will likely exceed 68 million by 2020, with high incidence of disease in third world countries undermining the social fabric. Anti-retroviral therapy, while having a tremendous impact on the course of disease in aggressively treated individuals, is expensive, difficult to implement on a large scale, and most importantly, not curative. Therefore, it is generally conceded that control of the HIV epidemic will not be possible until the development of an effective prophylactic vaccine. Unfortunately, the biology of the virus is problematic. In natural human HIV infection, or experimental infection of non-human primates (NHP) with the closely related simian immunodeficiency virus (SIV), infection is almost always progressive despite both cellular and humoral immune responses, and situations consistent with immunologic control of infection are uncommon and transient. In the NHP models, relatively strong vaccine-elicited cellular immune responses have shown promise in the control of certain pathogenic strains, but the longevity of the protective responses, the durability of the protection after exposure, and the general applicability of these results to the highly diverse, CCR5-tropic HIV strains likely to be encountered in the “real world” is uncertain. The rapid replication of these viruses and their profound genetic flexibility allow unrivaled evolution and adaptation to selection pressure. This capacity, together with the ability of these viruses to establish latency, results in a formidable barrier to immune control. It is therefore increasingly evident that if such control is to be established, it will take a quantitatively and qualitatively optimized immune response, likely including both cellular and humoral immunity. Such optimized immunity will necessarily be maintained for decades, able to immediately suppress and control any viral challenge before the virus can manifest escape.

[0006] From the humoral immune system perspective, it is increasingly apparent that high titre, neutralizing Abs (nAbs) can provide significant anti-viral activity, although the current ability to generate such responses with vaccines remains highly problematic. With regard to cellular immunity, the specific nature of such optimized responses remain speculative. However, based on clinical observations of HIV infection and data obtained from a variety of animal models of chronic viral infection (including SIV/SHIV models in NHP), it is anticipated that effective T cell responses will necessarily be 1) large in size (e.g., high frequency), 2) epitopically broad, 3) appropriately distributed (for example, “pre-positioned” at potential sites of viral entry and initial replication), 4) sensitive to low epitope densities (e.g., possess high functional avidity), 5) functionally appropriate (e.g., with regard to cytokine synthesis, cytotoxicity) and 6) maintained as such (e.g., 1-5) indefinitely. The latter point is especially important, as the rapid replication and evolution capabilities of these lentiviruses are such that even the rapid effector cell precursor expansions associated with a memory response may come too late to prevent immune escape and viral outgrowth.

[0007] In recent years the field has focused on the induction of strong anti-viral cellular immunity using replication incompetent viral vectors (e.g., vaccinia derivatives, adenovirus), either alone or following priming with Ag-encoding DNA. Despite the relative inability of these approaches to generate high titre nAbs, such vaccines have been effective in providing significant cell-mediated protection against certain challenges (see below). They have not, however, been particularly effective in controlling chronic-aggressive SIVs (e.g., SIVmac239) in NHPs, and the longevity of protective responses pre-challenge and durability of protection after challenge has not been rigorously explored. Indeed, at this point, the best “protection” has not been generated by these approaches, but rather by vaccination of NHP with attenuated SIVs (e.g., Δnef SIV), which have protected against aggressive SIV challenge. Unfortunately, for the live attenuated SIV approach to work, the attenuation needs to be modest, and the potential for full pathogenicity and disease by the vaccine itself has proved unacceptably high. If the protection afforded by attenuated SIV exposure is indeed immunologically mediated (and increasing evidence suggests it is—see herein below), the relative effectiveness of this approach suggests that chronic/continuous vector infection might have quantitative or qualitative advantages over the more episodic/limited Ag exposure afforded by conventional prime-boost strategies.

[0008] Therefore, there is a pronounced need in the art for SIV and HIV vaccination vectors capable of chronic infection, high immunogenicity, and yet unable or highly unlikely to cause significant disease by themselves.

### SUMMARY OF THE INVENTION

[0009] Particular aspects provide for use of the β-herpesvirus Cytomegalovirus (CMV: RhCMV and HCMV) as a uniquely evolved “vector” for safely initiating and indefinitely maintaining high level cellular and humoral immune responses (against, e.g., HIV, SIV, TB, etc.).

[0010] According to particular aspects, CMV (e.g., RhCMV and HCMV) is engineerable to express SIV or HIV determinants in highly immunogenic form, and to invoke high level, persistent cellular and humoral immunity in vaccinated subjects, even those that have had prior CMV exposure.

[0011] According to additional aspects, the immunity to SIV and HIV determinants is superior in intensity, persistence, and/or “quality” (e.g., functional attributes and localization) to prior art approaches, resulting in more effective control of pathogenic SIV and HIV challenges

[0012] According to further aspects, repeated vaccinations with the same core CMV-based vector containing different/modified Ags is feasible and productive, because of CMV's highly evolved capability to “slip” by the immune response, thereby allowing either the de novo generation of unrelated responses, or responses to new epitopes contained within a modified Ag,

[0013] According to yet further aspects, the wildtype CMV genome is modifiable to enhance safety without sacrificing immunogenicity and persistence.

[0014] Particular aspects provide a method for treatment or prevention of HIV, SIV or TB, comprising infection of a subject in need thereof with at least one recombinant CMV-based vector (e.g., HCMV or RhCMV) comprising an expressible HIV/SUV/TB antigen or a variant or fusion protein thereof. In particular embodiments of the method, infection is of an immunocompetent, HCMV or RhCMV seropositive subject.

[0015] In certain embodiments, the at least one HIV antigen is selected from the group consisting of gag, pol, env, nef, rev, tat, vif, vpr, vpu, and antigenic portions, variants and fusion proteins thereof. In certain embodiments, the at least one SIV antigen is selected from the group consisting of gag, pol, env, nef, rev, tat, vif, vpx, and antigenic portions, variants and fusion proteins thereof. In certain embodiments, the at least one TB antigen is selected from the group consisting of ESAT-6, Ag85A, AG85B, MPT51, MPT64, CFP10, TB10.4, Mtb8.4, hspX, CFP6, Mtb12, Mtb9.9 antigens, Mtb32A, PstS-1, PstS-2, PstS-3, MPT63, Mtb39, Mtb41, MPT83, 71-kDa, PPE 68, LppX, and antigenic portions, variants and fusion proteins thereof.

[0016] Additional embodiments comprise serial re-infection with at least one recombinant HCMV or RhCMV vector comprising an expressible HIV/SIV/TB antigen or a variant or fusion protein thereof. In certain embodiments, the expressible HIV/SIV/TB antigen, or variant or fusion protein thereof, of the serial re-infection vector is different than that of the initial infection vector. In some embodiments, expression is driven by an antigen encoding sequence in operable association with a promoter selected from the group consisting of a constitutive CMV promoter, an immediate early CMV promoter, an early CMV promoter and a late CMV promoter. In particular embodiments, the promoter is selected from the group consisting of EF1-alpha, MIE, pp65 and gH.

[0017] Further aspects provide a recombinant HCMV or RhCMV vaccine vector, comprising an expressible HIV/SIV/TB antigen or a variant or fusion protein thereof. Preferably, the vector comprises ‘suicide’ or ‘safety’ means. In particular vector embodiments, expression is driven by an antigen encoding sequence in operable association with a promoter selected from the group consisting of a constitutive CMV promoter, an immediate early CMV promoter, an early CMV promoter and a late CMV promoter. In some embodiments, the promoter is selected from the group consisting of EF1-alpha, MIE, pp65 and gH.

[0018] Additionally provided are pharmaceutical compositions, comprising, along with a pharmaceutically acceptable carrier or excipient, a recombinant HCMV or RhCMV comprising an expressible HIV/SIV/TB antigen or a variant or fusion protein thereof. Preferably, the recombinant HCMV or RhCMV vaccine vector comprises suicide or safety means.

### BRIEF DESCRIPTION OF THE DRAWINGS

[0019] FIGS. 1A and 1B show, according to particular aspects, a summary of applicants' analysis of T cell immunity to HCMV.

[0020] FIGS. 2A, 2B and 2C show, according to particular aspects, robust peripheral blood T cell responses to RhCMV (2A), peripheral blood T cell responses to RhCMV in 27 adult males (2B), and that RhCMV-specific memory T cells are highly enriched in spleen and lung (2C).

[0021] FIG. 3 shows, according to particular aspects, immunologic evidence and proof of RhCMV re-infection, and depicts CMV-specific CD4+ and CD8+ T cell frequencies/proliferative status in blood and plasma Ab titers after “re-infection.”

[0022] FIGS. 4A and 4B show, according to particular aspects, a schematic of Cre/LoxP-based recombination for construction of RhCMVvLoxP-based RhCMV/SIVmac239gag recombinants.

[0023] FIG. 5 shows, according to particular aspects, RhCMV/SIVgag re-infection of RhCMV-seropositive RMs.

[0024] FIGS. 6A, 6B, 6C and 6D show, according to particular aspects, induction and boosting of gag T cell and Ab responses by RhCMV-vectored SIVgag in the setting of re-infection.

[0025] FIG. 7 shows, according to particular aspects, a comparison of gag-specific T cell frequencies in SIV(Δnef) and RhCMV(gag)-immunized RM. In both groups, both Cd4+ and Cd8+ gag-specific T cell responses were higher in lung as compared to blood, even through the percentages in blood were memory corrected.

[0026] FIG. 8 shows, according to particular aspects, quantification and characterization of a young adult RM peripheral blood CD4+ and CD8+ T cell responses to RhCMV IE-1 15mer mix by “1O color” cytokine flow cytometry.

[0027] FIG. 9 shows, according to particular aspects, construction of RhCMV and HCMV vaccine vectors. Heterologous pathogen antigen(s) are inserted into RhCMV or HCMV bacterial artificial chromosomes (BACs) by E/T and Flp-mediated recombination.

[0028] FIG. 10 shows, according to particular aspects, an exemplary tetracycline-regulated RhCMV/HCMV ‘safety’ vaccine vector. This RhCMV/HCMV safety vector contains two interactive genetic components within the RhCMV/HCMV genome that together enable Tet-induced vector inactivation.

[0029] FIG. 11 shows, according to particular aspects, another exemplary tetracycline-regulated RhCMV/HCMV ‘safety’ vaccine vector. Such RhCMV/HCMV vaccine vectors are constructed by placing a gene essential for virus replication, (in this example, Rh70 (HCMV homologue-UL44); DNA polymerase processivity factor), under control of the Tet-inducible system described in FIG. 10.

[0030] FIG. 12 shows, according to particular aspects, another exemplary tetracycline-regulated RhCMV/HCMV ‘safety’ vaccine vector. Such RhCMV/HCMV vaccine vectors are constructed containing a cytotoxic gene (CytoG) under control of the Tet-inducible system as detailed in FIG. 11. After inoculation of animals with Tet-regulated vectors in the absence of Dox, virus replication can be rapidly inactivated by Dox-mediated induction of the cytopathic gene resulting in death of the vaccine vector-infected cell.

[0031] FIG. 13 shows, according to particular aspects, construction of exemplary RhCMV and HCMV gene therapy vectors. Therapeutic gene(s) are inserted into RhCMV or HCMV bacterial artificial chromosomes (BACs) by E/T and Flp-mediated recombination. The schematic shows a generalized strategy for insertion of an epitope-tagged therapeutic gene into the non-coding region between rh213 and Rh214 of RhCMV. This strategy can be similarly used for insertion of therapeutic genes at other defined sites within the RhCMV/HCMV genome

### DETAILED DESCRIPTION OF THE INVENTION

[0032] Particular aspects provide for use of recombinant β-herpesvirus Cytomegaloviruses (CMV) as a uniquely evolved “vector” for safely initiating and indefinitely maintaining high level cellular and humoral immune responses against simian immunodeficiency virus (SIV) and human immunodeficiency virus (HIV) and other currently intractable conditions (e.g., tuberculosis, etc.).

[0033] According to particular aspects of the present invention, such novel use of CMV vectors (e.g., RhCMV and HCMV) is premised upon the following factors:

[0034] (1) CMV elicits an astoundingly high frequency (steady-state) T cell response, at least an order of magnitude higher than that of any non-persistent virus (it is not uncommon for CMV-specific T cells to encompass >20% of the circulating memory repertoire), and the representation of CMV-specific T cells is even higher in tissues such as the lung and liver;

[0035] (2) CMV elicits high-titre nAb (neutralizing antibody) responses, including at mucosal surfaces;

[0036] (3) The above responses are maintained indefinitely;

[0037] (4) CMV is capable of re-infecting already chronically infected individuals, even in the face of high level immunity, and such re-infection not only potently and permanently boosts existing CMV-specific responses (likely accounting for the high frequencies of these responses in long-term infected adults), but is also capable of rapidly inducing new responses to distinct CMV-encoded epitopes/Ags (indeed, according to particular aspects, serial re-infections are possible, so that new responses to a series of distinct Ags or epitopes can be repeatedly generated using the same core vector);

[0038] (5) CMV engenders pathogenicity only in very specific (and over all quite rare) situations of immune deficiency or immaturity (its potential for disease is among the best documented among potential human pathogens);

[0039] (6) CMV is not associated with malignancies; and most significantly;

[0040] (7) CMV is ubiquitous-most of humanity, including the vast majority of subjects in areas with high incidence HIV infection, already harbor this virus.

[0041] Given the safety issues of attenuated lentivirus vaccines, which have led to their near abandonment as potential human vaccines, the last points are very significant. CMV, as disclosed herein and as supported by the data presented below, has substantial utility for effectively functioning as a vector in subjects with prior CMV immunity, and the use of these vectors—even those based on the wildtype CMV genome (e.g., not further modified for safety)—exposes such vaccines to little risk over and above what they are already subject to as a result of their naturally acquired CMV.

[0042] Therefore, according to particular aspects:
[0043] CMV (e.g., RhCMV and HCMV) is engineerable to express determinants (e.g., SIV, HIV, TB) in highly immunogenic form, and to invoke high level, persistent cellular and humoral immunity in vaccinated subjects, even those that have had prior CMV exposure;
[0044] the immunity to SIV and HIV determinants is superior in intensity, persistence, and/or “quality” (e.g., functional attributes and localization) to prior art approaches, resulting in more effective control of pathogenic challenges (e.g., SIV, HIV, TB);
[0045] repeated vaccinations with the same core CMV-based vector containing different/modified Ags is feasible and productive, because of CMV's highly evolved capability to “slip” by the immune response, thereby allowing either the de novo generation of unrelated responses, or responses to new epitopes contained within a modified Ag; and
[0046] the wildtype CMV genome is modifiable to enhance safety without sacrificing immunogenicity and persistence.

### SPECIFIC PREFERRED EMBODIMENTS

[0047] Particular aspects provide a method for treatment or prevention of HIV, comprising infection of a subject in need thereof with at least one recombinant HCMV vector comprising an expressible HIV antigen or a variant or fusion protein thereof. In particular embodiments of the method, infection is of an immunocompetent, HCMV seropositive subject. In certain embodiments, the at least one HIV antigen is selected from the group consisting of gag, pol, env, nef, rev, tat, vif, vpr, vpu, and antigenic portions, variants and fusion proteins thereof. Additional embodiments comprise serial re-infection with at least one recombinant HCMV vector comprising an expressible HIV antigen or a variant or fusion protein thereof. In certain embodiments, the expressible HIV antigen, or variant or fusion protein thereof, of the serial re-infection vector is different than that of the initial infection vector. In some embodiments, expression is driven by an antigen encoding sequence in operable association with a promoter selected from the group consisting of a constitutive CMV promoter, an immediate early CMV promoter, an early CMV promoter and a late CMV promoter. In particular embodiments, the promoter is selected from the group consisting of EF1-alpha, MIE, pp65 and gH.

[0048] Additional aspects provide a method for treatment or prevention of SIV, comprising infection of a subject in need thereof with at least one recombinant RhCMV vector comprising an expressible SIV antigen or a variant or fusion protein thereof. In particular embodiments, infection is of an immunocompetent, RhCMV seropositive subject. In certain embodiments, the at least one SIV antigen is selected from the group consisting of gag, pol, env, nef, rev, tat, vif, vpx, and antigenic portions, variants and fusion proteins thereof. In particular embodiments, the method further comprises serial re-infection with at least one recombinant RhCMV vector comprising an expressible SIV antigen or a variant or fusion protein thereof. In some embodiments, the expressible SIV antigen, or variant or fusion protein thereof, of the serial re-infection vector is different than that of the initial infection vector. In particular embodiments, expression is driven by an antigen encoding sequence in operable association with a promoter selected from the group consisting of a constitutive CMV promoter, an immediate early CMV promoter, an early CMV promoter and a late CMV promoter. In certain embodiments, the promoter is selected from the group consisting of EF1-alpha, MIE, pp65 and gH.

[0049] Further aspects provide a recombinant HCMV vaccine vector, comprising an expressible HIV antigen or a variant or fusion protein thereof. Preferably, the vector comprises ‘suicide’ or ‘safety’ means. In particular vector embodiments, expression is driven by an antigen encoding sequence in operable association with a promoter selected from the group consisting of a constitutive CMV promoter, an immediate early CMV promoter, an early CMV promoter and a late CMV promoter. In some embodiments, the promoter is selected from the group consisting of EF1-alpha, MIE, pp65 and gH.

[0050] Yet further provide are recombinant RhCMV vaccine vectors, comprising an expressible SIV antigen or a variant or fusion protein thereof. Preferably, such vectors comprise suicide or safety means. In particular embodiments, expression is driven by an antigen encoding sequence in operable association with a promoter selected from the group consisting of a constitutive CMV promoter, an immediate early CMV promoter, an early CMV promoter and a late CMV promoter. In some embodiments, the promoter is selected from the group consisting of EF1-alpha, MIE, pp65 and gH.

[0051] Additionally provided are pharmaceutical compositions, comprising, along with a pharmaceutically acceptable carrier or excipient, a recombinant HCMV comprising an expressible HIV antigen or a variant or fusion protein thereof. Preferably, the recombinant HCMV vaccine vector comprises suicide or safety means.

[0052] Additionally provided are pharmaceutical compositions, comprising, along with a pharmaceutically acceptable carrier or excipient, a recombinant RhCMV comprising an expressible SIV antigen or a variant or fusion protein thereof. Preferably, the recombinant RhCMV vaccine vector comprises suicide or safety means.

[0053] Yet further aspects provide a method for treatment or prevention of TB, comprising infection of a subject in need thereof with at least one recombinant HCMV vector comprising an expressible TB antigen or a variant or fusion protein thereof. In particular embodiments, infection is of an immunocompetent, TB seropositive subject. In certain embodiments, the at least one TB antigen is selected from the group consisting of ESAT-6, Ag85A, AG85B, MPT51, MPT64, CFP10, TB10.4, Mtb8.4, hspX, CFP6, Mtb12, Mtb9.9 antigens, Mtb32A, PstS-1, PstS-2, PstS-3, MPT63, Mtb39, Mtb41, MPT83, 71-kDa, PPE 68, LppX, and antigenic portions, variants and fusion proteins thereof. In particular embodiments, the method further comprises serial re-infection with at least one recombinant HCMV vector comprising an expressible TB antigen or a variant or fusion protein thereof. In certain embodiments, the expressible TB antigen, or variant or fusion protein thereof, of the serial re-infection vector is different than that of the initial infection vector. In some embodiments, expression is driven by an antigen encoding sequence in operable association with a promoter selected from the group consisting of a constitutive CMV promoter, an immediate early CMV promoter, an early CMV promoter and a late CMV promoter. In some embodiments, the promoter is selected from the group consisting of EF1-alpha, MIE, pp65 and gH.

[0054] Also provided is a recombinant HCMV vaccine vector, comprising an expressible TB antigen or a variant or fusion protein thereof. Preferably, the vector comprises suicide or safety means. In certain embodiments, expression is driven by an antigen encoding sequence in operable association with a promoter selected from the group consisting of a constitutive CMV promoter, an immediate early CMV promoter, an early CMV promoter and a late CMV promoter. In some embodiments, the promoter is selected from the group consisting of EF1-alpha, MIE, pp65 and gH.

[0055] Additionally provided is a pharmaceutical composition, comprising, along with a pharmaceutically acceptable carrier or excipient, a recombinant HCMV comprising an expressible TB antigen or a variant or fusion protein thereof. Preferably, the recombinant HCMV vaccine vector comprises suicide or safety means.

### Polynucleotide Compositions.

[0056] As used herein, the terms “DNA segment” and “polynucleotide” refer to a DNA molecule that has been isolated free of total genomic DNA of a particular species. Therefore, a DNA segment encoding a polypeptide refers to a DNA segment that contains one or more coding sequences yet is substantially isolated away from, or purified free from, total genomic DNA of the species from which the DNA segment is obtained. Included within the terms “DNA segment” and “polynucleotide” are DNA segments and smaller fragments of such segments, and also recombinant vectors, including, for example, plasmids, cosmids, phagemids, phage, viruses, and the like.

[0057] As will be understood by those skilled in the art, the DNA segments of this invention can include genomic sequences, extra-genomic and plasmid-encoded sequences and smaller engineered gene segments that express, or may be adapted to express, proteins, polypeptides, peptides and the like. Such segments may be naturally isolated, or modified synthetically by the hand of man.

[0058] “Isolated,” as used herein, means that a polynucleotide is substantially away from other coding sequences, and that the DNA segment does not contain large portions of unrelated coding DNA, such as large chromosomal fragments or other functional genes or polypeptide coding regions. Of course, this refers to the DNA segment as originally isolated, and does not exclude genes or coding regions later added to the segment by the hand of man.

[0059] As will be recognized by the skilled artisan, polynucleotides may be single-stranded (coding or antisense) or double-stranded, and may be DNA (genomic, cDNA or synthetic) or RNA molecules. RNA molecules include HnRNA molecules, which contain introns and correspond to a DNA molecule in a one-to-one manner, and mRNA molecules, which do not contain introns. Additional coding or non-coding sequences may, but need not, be present within a polynucleotide of the present invention, and a polynucleotide may, but need not, be linked to other molecules and/or support materials.

[0060] Polynucleotides may comprise a native sequence (e.g., an endogenous sequence that encodes a CMV, HIV, SIV or TB protein or a portion thereof) or may comprise a variant, or a biological or antigenic functional equivalent of such a sequence.

[0061] Polynucleotide “variants” may contain one or more substitutions, additions, deletions and/or insertions, as further described below, preferably such that the immunogenicity of the encoded polypeptide is not diminished, relative to a native CMV, HIV, SIV or TB protein. The effect on the immunogenicity of the encoded polypeptide may generally be assessed as described herein. The term “variants” also encompasses homologous genes of xenogeneic origin.

[0062] When comparing polynucleotide or polypeptide sequences, two sequences are said to be “identical” if the sequence of nucleotides or amino acids in the two sequences is the same when aligned for maximum correspondence, as described below. Comparisons between two sequences are typically performed by comparing the sequences over a comparison window to identify and compare local regions of sequence similarity. A “comparison window” as used herein, refers to a segment of at least about 20 contiguous positions, usually 30 to about 75, preferably 40 to about 50, in which a sequence may be compared to a reference sequence of the same number of contiguous positions after the two sequences are optimally aligned.

[0063] Optimal alignment of sequences for comparison may be conducted using the Megalign program in the Lasergene suite of bioinformatics software (DNASTAR, Inc., Madison, Wis.), using default parameters. This program embodies several alignment schemes described in the following references: Dayhoff, M. O. (1978) A model of evolutionary change in proteins—Matrices for detecting distant relationships. In Dayhoff, M. O. (ed.) Atlas of Protein Sequence and Structure, National Biomedical Research Foundation, Washington D.C. Vol. 5, Suppl. 3, pp. 345-358; Hein J. (1990) Unified Approach to Alignment and Phylogenes pp. 626-645 Methods in Enzymology vol. 183, Academic Press, Inc., San Diego, Calif.; Higgins, D. G. and Sharp, P. M. (1989) CABIOS 5:151-153; Myers, E. W. and Muller W. (1988) CABIOS 4:11-17; Robinson, E. D. (1971) Comb. Theor 11:105; Santou, N. Nes, M. (1987) Mol. Biol. Evol. 4:406-425; Sneath, P. H. A. and Sokal, R. R. (1973) Numerical Taxonomy—the Principles and Practice of Numerical Taxonomy, Freeman Press, San Francisco, Calif.; Wilbur, W. J. and Lipman, D. J. (1983) Proc. Natl. Acad., Sci. USA 80:726-730.

[0064] Alternatively, optimal alignment of sequences for comparison may be conducted by the local identity algorithm of Smith and Waterman (1981) Add. APL. Math 2:482, by the identity alignment algorithm of Needleman and Wunsch (1970) J. Mol. Biol. 48:443, by the search for similarity methods of Pearson and Lipman (1988) Proc. Natl. Acad. Sci. USA 85: 2444, by computerized implementations of these algorithms (GAP, BESTFIT, BLAST, FASTA, and TFASTA in the Wisconsin Genetics Software Package, Genetics Computer Group (GCG), 575 Science Dr., Madison, Wis.), or by inspection.

[0065] One preferred example of algorithms that are suitable for determining percent sequence identity and sequence similarity are the BLAST and BLAST 2.0 algorithms, which are described in Altschul et al. (1977) Nucl. Acids Res. 25:3389-3402 and Altschul et al. (1990) J. Mol. Biol. 215:403-410, respectively. BLAST and BLAST 2.0 can be used, for example with the parameters described herein, to determine percent sequence identity for the polynucleotides and polypeptides of the invention. Software for performing BLAST analyses is publicly available through the National Center for Biotechnology Information. In one illustrative example, cumulative scores can be calculated using, for nucleotide sequences, the parameters M (reward score for a pair of matching residues; always >0) and N (penalty score for mismatching residues; always <0). For amino acid sequences, a scoring matrix can be used to calculate the cumulative score. Extension of the word hits in each direction are halted when: the cumulative alignment score falls off by the quantity X from its maximum achieved value; the cumulative score goes to zero or below, due to the accumulation of one or more negative-scoring residue alignments; or the end of either sequence is reached. The BLAST algorithm parameters W, T and X determine the sensitivity and speed of the alignment. The BLASTN program (for nucleotide sequences) uses as defaults a wordlength (W) of 11, and expectation (E) of 10, and the BLOSUM62 scoring matrix (see Henikoff and Henikoff (1989) Proc. Natl. Acad. Sci. USA 89:10915) alignments, (B) of 50, expectation (E) of 10, M=5, N=−4 and a comparison of both strands.

[0066] Preferably, the “percentage of sequence identity” is determined by comparing two optimally aligned sequences over a window of comparison of at least 20 positions, wherein the portion of the polynucleotide or polypeptide sequence in the comparison window may comprise additions or deletions (i.e., gaps) of 20 percent or less, usually 5 to 15 percent, or 10 to 12 percent, as compared to the reference sequences (which does not comprise additions or deletions) for optimal alignment of the two sequences. The percentage is calculated by determining the number of positions at which the identical nucleic acid bases or amino acid residue occurs in both sequences to yield the number of matched positions, dividing the number of matched positions by the total number of positions in the reference sequence (i.e., the window size) and multiplying the results by 100 to yield the percentage of sequence identity.

[0067] Therefore, the present invention encompasses polynucleotide and polypeptide sequences having substantial identity to the sequences disclosed herein, for example those comprising at least 50% sequence identity, preferably at least 55%, 60%, 65%, 70%, 75%, 80%, 85%, 90%, 95%, 96%, 97%, 98%, or 99% or higher, sequence identity compared to a polynucleotide or polypeptide sequence of this invention using the methods described herein, (e.g., BLAST analysis using standard parameters, as described below). One skilled in this art will recognize that these values can be appropriately adjusted to determine corresponding identity of proteins encoded by two nucleotide sequences by taking into account codon degeneracy, amino acid similarity, reading frame positioning and the like.

[0068] In additional embodiments, the present invention provides isolated polynucleotides and polypeptides comprising various lengths of contiguous stretches of sequence identical to or complementary to one or more of the sequences disclosed herein. For example, polynucleotides are provided by this invention that comprise at least about 15, 20, 30, 40, 50, 75, 100, 150, 200, 300, 400, 500 or 1000 or more contiguous nucleotides of one or more of the sequences disclosed herein as well as all intermediate lengths there between. It will be readily understood that “intermediate lengths”, in this context, means any length between the quoted values, such as 16, 17, 18, 19, etc.; 21, 22, 23, etc.; 30, 31, 32, etc.; 50, 51, 52, 53, etc.; 100, 101, 102, 103, etc.; 150, 151, 152, 153, etc.; including all integers through 200-500; 500-1,000, and the like.

[0069] The polynucleotides of the present invention, or fragments thereof, regardless of the length of the coding sequence itself, may be combined with other DNA sequences, such as promoters, polyadenylation signals, additional restriction enzyme sites, multiple cloning sites, other coding segments, and the like, such that their overall length may vary considerably. It is therefore contemplated that a nucleic acid fragment of almost any length may be employed, with the total length preferably being limited by the ease of preparation and use in the intended recombinant DNA protocol. For example, illustrative DNA segments with total lengths of about 10,000, about 5000, about 3000, about 2,000, about 1,000, about 500, about 200, about 100, about 50 base pairs in length, and the like, (including all intermediate lengths) are contemplated to be useful in many implementations of this invention.

[0070] In other embodiments, the present invention is directed to polynucleotides that are capable of hybridizing under moderately stringent conditions to a polynucleotide sequence provided herein, or a fragment thereof, or a complementary sequence thereof. Hybridization techniques are well known in the art of molecular biology. For purposes of illustration, suitable moderately stringent conditions for testing the hybridization of a polynucleotide of this invention with other polynucleotides include prewashing in a solution of 5×SSC, 0.5% SDS, 1.0 mM EDTA (pH 8.0); hybridizing at 50° C.-65° C., 5×SSC, overnight; followed by washing twice at 65° C. for 20 minutes with each of 2×, 0.5× and 0.2×SSC containing 0.1% SDS.

[0071] Moreover, it will be appreciated by those of ordinary skill in the art that, as a result of the degeneracy of the genetic code, there are many nucleotide sequences that encode a polypeptide as described herein. Some of these polynucleotides bear minimal homology to the nucleotide sequence of any native gene. Nonetheless, polynucleotides that vary due to differences in codon usage are specifically contemplated by the present invention. Further, alleles of the genes comprising the polynucleotide sequences provided herein are within the scope of the present invention. Alleles are endogenous genes that are altered as a result of one or more mutations, such as deletions, additions and/or substitutions of nucleotides. The resulting mRNA and protein may, but need not, have an altered structure or function. Alleles may be identified using standard techniques (such as hybridization, amplification and/or database sequence comparison)

### Polypeptide Compositions

[0072] The present invention, in other aspects, provides polypeptide compositions. Generally, a polypeptide of the invention will be an isolated polypeptide (or an epitope, variant, or active fragment thereof) derived from CMV, HIV, SIV or TB, etc. Preferably, the polypeptide is encoded by a polynucleotide sequence disclosed herein or a sequence which hybridizes under moderate or highly stringent conditions to a polynucleotide sequence disclosed herein. Alternatively, the polypeptide may be defined as a polypeptide which comprises a contiguous amino acid sequence from an amino acid sequence disclosed herein, or which polypeptide comprises an entire amino acid sequence disclosed herein.

[0073] In the present invention, a polypeptide composition is also understood to comprise one or more polypeptides that are immunologically reactive with antibodies and/or T cells generated against a polypeptide of the invention, particularly a polypeptide having amino acid sequences disclosed herein, or to active fragments, or to variants or biologically functional equivalents thereof.

[0074] Likewise, a polypeptide composition of the present invention is understood to comprise one or more polypeptides that are capable of eliciting antibodies or T cells that are immunologically reactive with one or more polypeptides encoded by one or more contiguous nucleic acid sequences contained in the amino acid sequences disclosed herein, or to active fragments, or to variants thereof, or to one or more nucleic acid sequences which hybridize to one or more of these sequences under conditions of moderate to high stringency. Particularly illustrative polypeptides comprise the CMV, HIV, SIV and TB amino acid sequence disclosed in the Sequence Listing.

[0075] As used herein, an active fragment of a polypeptide includes a whole or a portion of a polypeptide which is modified by conventional techniques, e.g., mutagenesis, or by addition, deletion, or substitution, but which active fragment exhibits substantially the same structure function, antigenicity, etc., as a polypeptide as described herein.

[0076] In certain illustrative embodiments, the polypeptides of the invention will comprise at least an immunogenic portion of a CMV antigen or a variant or biological functional equivalent thereof, as described herein. Polypeptides as described herein may be of any length. Additional sequences derived from the native protein and/or heterologous sequences may be present, and such sequences may (but need not) possess further immunogenic or antigenic properties.

[0077] An “immunogenic portion,” as used herein is a portion of a protein that is recognized (i.e., specifically bound) by a B-cell and/or T-cell surface antigen receptor. Such immunogenic portions generally comprise at least 5 amino acid residues, more preferably at least 10, and still more preferably at least 20 amino acid residues of a CMV protein or a variant thereof. Certain preferred immunogenic portions include peptides in which an N-terminal leader sequence and/or transmembrane domain have been deleted. Other preferred immunogenic portions may contain a small N- and/or C-terminal deletion (e.g., 1-30 amino acids, preferably 5-15 amino acids), relative to the mature protein.

[0078] Immunogenic portions may generally be identified using well known techniques, such as those summarized in Paul, Fundamental Immunology, 3rd ed., 243-247 (Raven Press, 1993) and references cited therein. Such techniques include screening polypeptides for the ability to react with antigen-specific antibodies, antisera and/or T-cell lines or clones. As used herein, antisera and antibodies are “antigen-specific” if they specifically bind to an antigen (i.e., they react with the protein in an ELISA or other immunoassay, and do not react detectably with unrelated proteins). Such antisera and antibodies may be prepared as described herein, and using well known techniques. An immunogenic portion of a native CMV, HIV, SIV or TB protein is a portion that reacts with such antisera and/or T-cells at a level that is not substantially less than the reactivity of the full length polypeptide (e.g., in an ELISA and/or T-cell reactivity assay). Such immunogenic portions may react within such assays at a level that is similar to or greater than the reactivity of the full length polypeptide. Such screens may generally be performed using methods well known to those of ordinary skill in the art, such as those described in Harlow and Lane, Antibodies: A Laboratory Manual, Cold Spring Harbor Laboratory, 1988. For example, a polypeptide may be immobilized on a solid support and contacted with patient sera to allow binding of antibodies within the sera to the immobilized polypeptide. Unbound sera may then be removed and bound antibodies detected using, for example, ¹²⁵I-labeled Protein A.

[0079] As noted above, a composition may comprise a variant of a native CMV, HIV, SIV or TB protein. A polypeptide “variant,” as used herein, is a polypeptide that differs from a native CMV protein in one or more substitutions, deletions, additions and/or insertions, such that the immunogenicity of the polypeptide is not substantially diminished. In other words, the ability of a variant to react with antigen-specific antisera may be enhanced or unchanged, relative to the native protein, or may be diminished by less than 50%, and preferably less than 20%, relative to the native protein. Such variants may generally be identified by modifying one of the above polypeptide sequences and evaluating the reactivity of the modified polypeptide with antigen-specific antibodies or antisera as described herein. Preferred variants include those in which one or more portions, such as an N-terminal leader sequence or transmembrane domain, have been removed. Other preferred variants include variants in which a small portion (e.g., 1-30 amino acids, preferably 5-15 amino acids) has been removed from the N- and/or C-terminal of the mature protein.

[0080] Polypeptide variants encompassed by the present invention include those exhibiting at least about 70%, 75%, 80%, 85%, 90%, 91%, 92%, 93%, 94%, 95%, 96%, 97%, 98%, or 99% or more identity (determined as described above) to the polypeptides disclosed herein.

[0081] Preferably, a variant contains conservative substitutions. A “conservative substitution” is one in which an amino acid is substituted for another amino acid that has similar properties, such that one skilled in the art of peptide chemistry would expect the secondary structure and hydropathic nature of the polypeptide to be substantially unchanged. Amino acid substitutions may generally be made on the basis of similarity in polarity, charge, solubility, hydrophobicity, hydrophilicity and/or the amphipathic nature of the residues. For example, negatively charged amino acids include aspartic acid and glutamic acid; positively charged amino acids include lysine and arginine; and amino acids with uncharged polar head groups having similar hydrophilicity values include leucine, isoleucine and valine; glycine and alanine; asparagine and glutamine; and serine, threonine, phenylalanine and tyrosine. Other groups of amino acids that may represent conservative changes include: (1) ala, pro, gly, glu, asp, gln, asn, ser, thr; (2) cys, ser, tyr, thr; (3) val, ile, leu, met, ala, phe; (4) lys, arg, his; and (5) phe, tyr, trp, his. A variant may also, or alternatively, contain nonconservative changes. In a preferred embodiment, variant polypeptides differ from a native sequence by substitution, deletion or addition of five amino acids or fewer. Variants may also (or alternatively) be modified by, for example, the deletion or addition of amino acids that have minimal influence on the immunogenicity, secondary structure and hydropathic nature of the polypeptide.

[0082] As noted above, polypeptides may comprise a signal (or leader) sequence at the N-terminal end of the protein, which co-translationally or post-translationally directs transfer of the protein. The polypeptide may also be conjugated to a linker or other sequence for ease of synthesis, purification or identification of the polypeptide (e.g., poly-His), or to enhance binding of the polypeptide to a solid support. For example, a polypeptide may be conjugated to an immunoglobulin Fc region.

[0083] Polypeptides may be prepared using any of a variety of well known techniques. Recombinant polypeptides encoded by DNA sequences as described above may be readily prepared from the DNA sequences using any of a variety of expression vectors known to those of ordinary skill in the art. Expression may be achieved in any appropriate host cell that has been transformed or transfected with an expression vector containing a DNA molecule that encodes a recombinant polypeptide. Suitable host cells include prokaryotes, yeast, and higher eukaryotic cells, such as mammalian cells and plant cells. Preferably, the host cells employed are E. coli, yeast or a mammalian cell line such as COS or CHO. Supernatants from suitable host/vector systems which secrete recombinant protein or polypeptide into culture media may be first concentrated using a commercially available filter. Following concentration, the concentrate may be applied to a suitable purification matrix such as an affinity matrix or an ion exchange resin. Finally, one or more reverse phase HPLC steps can be employed to further purify a recombinant polypeptide.

[0084] Portions and other variants having less than about 100 amino acids, and generally less than about 50 amino acids, may also be generated by synthetic means, using techniques well known to those of ordinary skill in the art. For example, such polypeptides may be synthesized using any of the commercially available solid-phase techniques, such as the Merrifield solid-phase synthesis method, where amino acids are sequentially added to a growing amino acid chain. See Merrifield, J. Am. Chem. Soc. 85:2149-2146, 1963. Equipment for automated synthesis of polypeptides is commercially available from suppliers such as Perkin Elmer/Applied BioSystems Division (Foster City, Calif.), and may be operated according to the manufacturer's instructions.

[0085] Within certain specific embodiments, a polypeptide may be a fusion protein that comprises multiple polypeptides as described herein, or that comprises at least one polypeptide as described herein and an unrelated sequence, such as a known protein. A fusion partner may, for example, assist in providing T helper epitopes (an immunological fusion partner), preferably T helper epitopes recognized by humans, or may assist in expressing the protein (an expression enhancer) at higher yields than the native recombinant protein. Certain preferred fusion partners are both immunological and expression enhancing fusion partners. Other fusion partners may be selected so as to increase the solubility of the protein or to enable the protein to be targeted to desired intracellular compartments. Still further fusion partners include affinity tags, which facilitate purification of the protein.

[0086] Fusion proteins may generally be prepared using standard techniques, including chemical conjugation. Preferably, a fusion protein is expressed as a recombinant protein, allowing the production of increased levels, relative to a non-fused protein, in an expression system. Briefly, DNA sequences encoding the polypeptide components may be assembled separately, and ligated into an appropriate expression vector. The 3′ end of the DNA sequence encoding one polypeptide component is ligated, with or without a peptide linker, to the 5′ end of a DNA sequence encoding the second polypeptide component so that the reading frames of the sequences are in phase. This permits translation into a single fusion protein that retains the biological activity of both component polypeptides.

[0087] A peptide linker sequence may be employed to separate the first and second polypeptide components by a distance sufficient to ensure that each polypeptide folds into its secondary and tertiary structures. Such a peptide linker sequence is incorporated into the fusion protein using standard techniques well known in the art. Suitable peptide linker sequences may be chosen based on the following factors: (1) their ability to adopt a flexible extended conformation; (2) their inability to adopt a secondary structure that could interact with functional epitopes on the first and second polypeptides; and (3) the lack of hydrophobic or charged residues that might react with the polypeptide functional epitopes. Preferred peptide linker sequences contain Gly, Asn and Ser residues. Other near neutral amino acids, such as Thr and Ala may also be used in the linker sequence. Amino acid sequences which may be usefully employed as linkers include those disclosed in Maratea et al., Gene 40:39-46, 1985; Murphy et al., Proc. Natl. Acad. Sci. USA 83:8258-8262, 1986; U.S. Pat. No. 4,935,233 and U.S. Pat. No. 4,751,180. The linker sequence may generally be from 1 to about 50 amino acids in length. Linker sequences are not required when the first and second polypeptides have non-essential N-terminal amino acid regions that can be used to separate the functional domains and prevent steric interference.

[0088] The ligated DNA sequences are operably linked to suitable transcriptional or translational regulatory elements. The regulatory elements responsible for expression of DNA are located only 5′ to the DNA sequence encoding the first polypeptides. Similarly, stop codons required to end translation and transcription termination signals are only present 3′ to the DNA sequence encoding the second polypeptide.

[0089] Fusion proteins are also provided. Such proteins comprise a polypeptide as described herein together with an unrelated immunogenic protein. Preferably the immunogenic protein is capable of eliciting a recall response. Examples of such proteins include tetanus, tuberculosis and hepatitis proteins (see, for example, Stoute et al. New Engl. J. Med., 336:86-91, 1997).

[0090] In general, polypeptides (including fusion proteins) and polynucleotides as described herein are isolated. An “isolated” polypeptide or polynucleotide is one that is removed from its original environment. For example, a naturally-occurring protein is isolated if it is separated from some or all of the coexisting materials in the natural system. Preferably, such polypeptides are at least about 90% pure, more preferably at least about 95% pure and most preferably at least about 99% pure. A polynucleotide is considered to be isolated if, for example, it is cloned into a vector that is not a part of the natural environment.

### Pharmaceutical Compositions

[0091] In additional embodiments, the present invention concerns formulation of one or more polynucleotide, polypeptide, T-cell and/or antibody compositions in pharmaceutically-acceptable solutions for administration to a cell or an animal, either alone, or in combination with one or more other modalities of therapy.

[0092] It will also be understood that, if desired, the nucleic acid segment, RNA, DNA or PNA compositions that express a polypeptide as disclosed herein may be administered in combination with other agents as well, such as, e.g., other proteins or polypeptides or various pharmaceutically-active agents. In fact, there is virtually no limit to other components that may also be included, given that the additional agents do not cause a significant adverse effect upon contact with the target cells or host tissues. The compositions may thus be delivered along with various other agents as required in the particular instance. Such compositions may be purified from host cells or other biological sources, or alternatively may be chemically synthesized as described herein. Likewise, such compositions may further comprise substituted or derivatized RNA or DNA compositions.

[0093] Formulation of pharmaceutically-acceptable excipients and carrier solutions is well-known to those of skill in the art, as is the development of suitable dosing and treatment regimens for using the particular compositions described herein in a variety of treatment regimens, including e.g., oral, parenteral, intravenous, intranasal, and intramuscular administration and formulation.

### Oral Delivery

[0094] In certain applications, the pharmaceutical compositions disclosed herein may be delivered via oral administration to an animal or subject. As such, these compositions may be formulated with an inert diluent or with an assimilable edible carrier, or they may be enclosed in hard- or soft-shell gelatin capsule, or they may be compressed into tablets, or they may be incorporated directly with the food of the diet.

[0095] The active compounds may even be incorporated with excipients and used in the form of ingestible tablets, buccal tables, troches, capsules, elixirs, suspensions, syrups, wafers, and the like (Mathiowitz et al., 1997; Hwang et al., 1998; U.S. Pat. No. 5,641,515; U.S. Pat. No. 5,580,579 and U.S. Pat. No. 5,792,451, each specifically incorporated herein by reference in its entirety). The tablets, troches, pills, capsules and the like may also contain the following: a binder, as gum tragacanth, acacia, cornstarch, or gelatin; excipients, such as dicalcium phosphate; a disintegrating agent, such as corn starch, potato starch, alginic acid and the like; a lubricant, such as magnesium stearate; and a sweetening agent, such as sucrose, lactose or saccharin may be added or a flavoring agent, such as peppermint, oil of wintergreen, or cherry flavoring. When the dosage unit form is a capsule, it may contain, in addition to materials of the above type, a liquid carrier. Various other materials may be present as coatings or to otherwise modify the physical form of the dosage unit. For instance, tablets, pills, or capsules may be coated with shellac, sugar, or both. A syrup of elixir may contain the active compound sucrose as a sweetening agent methyl and propylparabens as preservatives, a dye and flavoring, such as cherry or orange flavor. Of course, any material used in preparing any dosage unit form should be pharmaceutically pure and substantially non-toxic in the amounts employed. In addition, the active compounds may be incorporated into sustained-release preparation and formulations.

[0096] Typically, these formulations may contain at least about 0.1% of the active compound or more, although the percentage of the active ingredient(s) may, of course, be varied and may conveniently be between about 1 or 2% and about 60% or 70% or more of the weight or volume of the total formulation. Naturally, the amount of active compound(s) in each therapeutically useful composition may be prepared is such a way that a suitable dosage will be obtained in any given unit dose of the compound. Factors such as solubility, bioavailability, biological half-life, route of administration, product shelf life, as well as other pharmacological considerations will be contemplated by one skilled in the art of preparing such pharmaceutical formulations, and as such, a variety of dosages and treatment regimens may be desirable.

[0097] For oral administration the compositions of the present invention may alternatively be incorporated with one or more excipients in the form of a mouthwash, dentifrice, buccal tablet, oral spray, or sublingual orally-administered formulation. For example, a mouthwash may be prepared incorporating the active ingredient in the required amount in an appropriate solvent, such as a sodium borate solution (Dobell's Solution). Alternatively, the active ingredient may be incorporated into an oral solution such as one containing sodium borate, glycerin and potassium bicarbonate, or dispersed in a dentifrice, or added in a therapeutically-effective amount to a composition that may include water, binders, abrasives, flavoring agents, foaming agents, and humectants. Alternatively the compositions may be fashioned into a tablet or solution form that may be placed under the tongue or otherwise dissolved in the mouth.

### Injectable Delivery

[0098] In certain circumstances it will be desirable to deliver the pharmaceutical compositions disclosed herein subcutaneously, parenterally, intravenously, intramuscularly, or even intraperitoneally as described in U.S. Pat. No. 5,543,158; U.S. Pat. No. 5,641,515 and U.S. Pat. No. 5,399,363 (each specifically incorporated herein by reference in its entirety). Solutions of the active compounds as free base or pharmacologically acceptable salts may be prepared in water suitably mixed with a surfactant, such as hydroxypropylcellulose. Dispersions may also be prepared in glycerol, liquid polyethylene glycols, and mixtures thereof and in oils. Under ordinary conditions of storage and use, these preparations contain a preservative to prevent the growth of microorganisms.

[0099] The pharmaceutical forms suitable for injectable use include sterile aqueous solutions or dispersions and sterile powders for the extemporaneous preparation of sterile injectable solutions or dispersions (U.S. Pat. No. 5,466,468, specifically incorporated herein by reference in its entirety). In all cases the form must be sterile and must be fluid to the extent that easy syringability exists. It must be stable under the conditions of manufacture and storage and must be preserved against the contaminating action of microorganisms, such as bacteria and fungi. The carrier can be a solvent or dispersion medium containing, for example, water, ethanol, polyol (e.g., glycerol, propylene glycol, and liquid polyethylene glycol, and the like), suitable mixtures thereof, and/or vegetable oils. Proper fluidity may be maintained, for example, by the use of a coating, such as lecithin, by the maintenance of the required particle size in the case of dispersion and by the use of surfactants. The prevention of the action of microorganisms can be facilitated by various antibacterial and antifungal agents, for example, parabens, chlorobutanol, phenol, sorbic acid, thimerosal, and the like. In many cases, it will be preferable to include isotonic agents, for example, sugars or sodium chloride. Prolonged absorption of the injectable compositions can be brought about by the use in the compositions of agents delaying absorption, for example, aluminum monostearate and gelatin.

[0100] For parenteral administration in an aqueous solution, for example, the solution should be suitably buffered if necessary and the liquid diluent first rendered isotonic with sufficient saline or glucose. These particular aqueous solutions are especially suitable for intravenous, intramuscular, subcutaneous and intraperitoneal administration. In this connection, a sterile aqueous medium that can be employed will be known to those of skill in the art in light of the present disclosure. For example, one dosage may be dissolved in 1 ml of isotonic NaCl solution and either added to 1000 ml of hypodermoclysis fluid or injected at the proposed site of infusion, (see for example, “Remington's Pharmaceutical Sciences” 15th Edition, pages 1035-1038 and 1570-1580). Some variation in dosage will necessarily occur depending on the condition of the subject being treated. The person responsible for administration will, in any event, determine the appropriate dose for the individual subject. Moreover, for human administration, preparations should meet sterility, pyrogenicity, and the general safety and purity standards as required by FDA Office of Biologics standards.

[0101] Sterile injectable solutions are prepared by incorporating the active compounds in the required amount in the appropriate solvent with various of the other ingredients enumerated above, as required, followed by filtered sterilization. Generally, dispersions are prepared by incorporating the various sterilized active ingredients into a sterile vehicle which contains the basic dispersion medium and the required other ingredients from those enumerated above. In the case of sterile powders for the preparation of sterile injectable solutions, the preferred methods of preparation are vacuum-drying and freeze-drying techniques which yield a powder of the active ingredient plus any additional desired ingredient from a previously sterile-filtered solution thereof.

[0102] The compositions disclosed herein may be formulated in a neutral or salt form. Pharmaceutically-acceptable salts, include the acid addition salts (formed with the free amino groups of the protein) and which are formed with inorganic acids such as, for example, hydrochloric or phosphoric acids, or such organic acids as acetic, oxalic, tartaric, mandelic, and the like. Salts formed with the free carboxyl groups can also be derived from inorganic bases such as, for example, sodium, potassium, ammonium, calcium, or ferric hydroxides, and such organic bases as isopropylamine, trimethylamine, histidine, procaine and the like. Upon formulation, solutions will be administered in a manner compatible with the dosage formulation and in such amount as is therapeutically effective. The formulations are easily administered in a variety of dosage forms such as injectable solutions, drug-release capsules, and the like.

[0103] As used herein, “carrier” includes any and all solvents, dispersion media, vehicles, coatings, diluents, antibacterial and antifungal agents, isotonic and absorption delaying agents, buffers, carrier solutions, suspensions, colloids, and the like. The use of such media and agents for pharmaceutical active substances is well known in the art. Except insofar as any conventional media or agent is incompatible with the active ingredient, its use in the therapeutic compositions is contemplated. Supplementary active ingredients can also be incorporated into the compositions.

[0104] The phrase “pharmaceutically-acceptable” refers to molecular entities and compositions that do not produce an allergic or similar untoward reaction when administered to a human. The preparation of an aqueous composition that contains a protein as an active ingredient is well understood in the art. Typically, such compositions are prepared as injectables, either as liquid solutions or suspensions; solid forms suitable for solution in, or suspension in, liquid prior to injection can also be prepared. The preparation can also be emulsified.

### Nasal Delivery

[0105] In certain embodiments, the pharmaceutical compositions may be delivered by intranasal sprays, inhalation, and/or other aerosol delivery vehicles. Methods for delivering genes, nucleic acids, and peptide compositions directly to the lungs via nasal aerosol sprays has been described e.g., in U.S. Pat. No. 5,756,353 and U.S. Pat. No. 5,804,212 (each specifically incorporated herein by reference in its entirety). Likewise, the delivery of drugs using intranasal microparticle resins (Takenaga et al., 1998) and lysophosphatidyl-glycerol compounds (U.S. Pat. No. 5,725,871, specifically incorporated herein by reference in its entirety) are also well-known in the pharmaceutical arts. Likewise, transmucosal drug delivery in the form of a polytetrafluoroethylene support matrix is described in U.S. Pat. No. 5,780,045 (specifically incorporated herein by reference in its entirety).

### Liposome-, Nanocapsule-, and Microparticle-Mediated Delivery

[0106] In certain embodiments, the inventors contemplate the use of liposomes, nanocapsules, microparticles, microspheres, lipid particles, vesicles, and the like, for the introduction of the compositions of the present invention into suitable host cells. In particular, the compositions of the present invention may be formulated for delivery either encapsulated in a lipid particle, a liposome, a vesicle, a nanosphere, or a nanoparticle or the like.

[0107] Such formulations may be preferred for the introduction of pharmaceutically-acceptable formulations of the nucleic acids or constructs disclosed herein. The formation and use of liposomes is generally known to those of skill in the art (see for example, Couvreur et al., 1977; Couvreur, 1988; Lasic, 1998; which describes the use of liposomes and nanocapsules in the targeted antibiotic therapy for intracellular bacterial infections and diseases). Recently, liposomes were developed with improved serum stability and circulation half-times (Gabizon and Papahadjopoulos, 1988; Allen and Choun, 1987; U.S. Pat. No. 5,741,516, specifically incorporated herein by reference in its entirety). Further, various methods of liposome and liposome like preparations as potential drug carriers have been reviewed (Takakura, 1998; Chandran et al., 1997; Margalit, 1995; U.S. Pat. No. 5,567,434; U.S. Pat. No. 5,552,157; U.S. Pat. No. 5,565,213; U.S. Pat. No. 5,738,868 and U.S. Pat. No. 5,795,587, each specifically incorporated herein by reference in its entirety).

[0108] Liposomes have been used successfully with a number of cell types that are normally resistant to transfection by other procedures including T cell suspensions, primary hepatocyte cultures and PC 12 cells (Renneisen et al., 1990; Muller et al., 1990). In addition, liposomes are free of the DNA length constraints that are typical of viral-based delivery systems. Liposomes have been used effectively to introduce genes, drugs (Heath and Martin, 1986; Heath et al., 1986; Balazsovits et al., 1989; Fresta and Puglisi, 1996), radiotherapeutic agents (Pikul et al., 1987), enzymes (Imaizumi et al., 1990a; Imaizumi et al., 1990b), viruses (Faller and Baltimore, 1984), transcription factors and allosteric effectors (Nicolau and Gersonde, 1979) into a variety of cultured cell lines and animals. In addition, several successful clinical trials examining the effectiveness of liposome-mediated drug delivery have been completed (Lopez-Berestein et al., 1985a; 1985b; Coune, 1988; Sculier et al., 1988). Furthermore, several studies suggest that the use of liposomes is not associated with autoimmune responses, toxicity or gonadal localization after systemic delivery (Mori and Fukatsu, 1992).

[0109] Liposomes are formed from phospholipids that are dispersed in an aqueous medium and spontaneously form multilamellar concentric bilayer vesicles (also termed multilamellar vesicles (MLVs). MLVs generally have diameters of from 25 nm to 4 μm. Sonication of MLVs results in the formation of small unilamellar vesicles (SUVs) with diameters in the range of 200 to 500 Å, containing an aqueous solution in the core.

[0110] Liposomes bear resemblance to cellular membranes and are contemplated for use in connection with the present invention as carriers for the peptide compositions. They are widely suitable as both water- and lipid-soluble substances can be entrapped, i.e., in the aqueous spaces and within the bilayer itself, respectively. It is possible that the drug-bearing liposomes may even be employed for site-specific delivery of active agents by selectively modifying the liposomal formulation.

[0111] In addition to the teachings of Couvreur et al. (1977; 1988), the following information may be utilized in generating liposomal formulations. Phospholipids can form a variety of structures other than liposomes when dispersed in water, depending on the molar ratio of lipid to water. At low ratios the liposome is the preferred structure. The physical characteristics of liposomes depend on pH, ionic strength and the presence of divalent cations. Liposomes can show low permeability to ionic and polar substances, but at elevated temperatures undergo a phase transition which markedly alters their permeability. The phase transition involves a change from a closely packed, ordered structure, known as the gel state, to a loosely packed, less-ordered structure, known as the fluid state. This occurs at a characteristic phase-transition temperature and results in an increase in permeability to ions, sugars and drugs.

[0112] In addition to temperature, exposure to proteins can alter the permeability of liposomes. Certain soluble proteins, such as cytochrome c, bind, deform and penetrate the bilayer, thereby causing changes in permeability. Cholesterol inhibits this penetration of proteins, apparently by packing the phospholipids more tightly. It is contemplated that the most useful liposome formations for antibiotic and inhibitor delivery will contain cholesterol.

[0113] The ability to trap solutes varies between different types of liposomes. For example, MLVs are moderately efficient at trapping solutes, but SUVs are extremely inefficient. SUVs offer the advantage of homogeneity and reproducibility in size distribution, however, and a compromise between size and trapping efficiency is offered by large unilamellar vesicles (LUVs). These are prepared by ether evaporation and are three to four times more efficient at solute entrapment than MLVs.

[0114] In addition to liposome characteristics, an important determinant in entrapping compounds is the physicochemical properties of the compound itself. Polar compounds are trapped in the aqueous spaces and nonpolar compounds bind to the lipid bilayer of the vesicle. Polar compounds are released through permeation or when the bilayer is broken, but nonpolar compounds remain affiliated with the bilayer unless it is disrupted by temperature or exposure to lipoproteins. Both types show maximum efflux rates at the phase transition temperature.

[0115] Liposomes interact with cells via four different mechanisms: endocytosis by phagocytic cells of the reticuloendothelial system such as macrophages and neutrophils; adsorption to the cell surface, either by nonspecific weak hydrophobic or electrostatic forces, or by specific interactions with cell-surface components; fusion with the plasma cell membrane by insertion of the lipid bilayer of the liposome into the plasma membrane, with simultaneous release of liposomal contents into the cytoplasm; and by transfer of liposomal lipids to cellular or subcellular membranes, or vice versa, without any association of the liposome contents. It often is difficult to determine which mechanism is operative and more than one may operate at the same time.

[0116] The fate and disposition of intravenously injected liposomes depend on their physical properties, such as size, fluidity, and surface charge. They may persist in tissues for h or days, depending on their composition, and half lives in the blood range from min to several h. Larger liposomes, such as MLVs and LUVs, are taken up rapidly by phagocytic cells of the reticuloendothelial system, but physiology of the circulatory system restrains the exit of such large species at most sites. They can exit only in places where large openings or pores exist in the capillary endothelium, such as the sinusoids of the liver or spleen. Thus, these organs are the predominate site of uptake. On the other hand, SUVs show a broader tissue distribution but still are sequestered highly in the liver and spleen. In general, this in vivo behavior limits the potential targeting of liposomes to only those organs and tissues accessible to their large size. These include the blood, liver, spleen, bone marrow, and lymphoid organs.

[0117] Targeting is generally not a limitation in terms of the present invention. However, should specific targeting be desired, methods are available for this to be accomplished. Antibodies may be used to bind to the liposome surface and to direct the antibody and its drug contents to specific antigenic receptors located on a particular cell-type surface. Carbohydrate determinants (glycoprotein or glycolipid cell-surface components that play a role in cell-cell recognition, interaction and adhesion) may also be used as recognition sites as they have potential in directing liposomes to particular cell types. Mostly, it is contemplated that intravenous injection of liposomal preparations would be used, but other routes of administration are also conceivable.

[0118] Alternatively, the invention provides for pharmaceutically-acceptable nanocapsule formulations of the compositions of the present invention. Nanocapsules can generally entrap compounds in a stable and reproducible way (Henry-Michelland et al., 1987; Quintanar-Guerrero et al., 1998; Douglas et al., 1987). To avoid side effects due to intracellular polymeric overloading, such ultrafine particles (sized around 0.1 μm) should be designed using polymers able to be degraded in vivo. Biodegradable polyalkyl-cyanoacrylate nanoparticles that meet these requirements are contemplated for use in the present invention. Such particles may be are easily made, as described (Couvreur et al., 1980; 1988; zur Muhlen et al., 1998; Zambaux et al. 1998; Pinto-Alphandry et al., 1995 and U.S. Pat. No. 5,145,684, specifically incorporated herein by reference in its entirety).

### Vaccines

[0119] In certain preferred embodiments of the present invention, HCMV and RhCMV-based recombinant vaccines are provided. The vaccines will generally comprise one or more pharmaceutical compositions, such as those discussed above, in optional combination with an immunostimulant. An immunostimulant may be any substance that enhances or potentiates an immune response (antibody and/or cell-mediated) to an exogenous antigen. Examples of immunostimulants include adjuvants, biodegradable microspheres (e.g., polylactic galactide) and liposomes (into which the compound is incorporated; see e.g., Fullerton, U.S. Pat. No. 4,235,877). Vaccine preparation is generally described in, for example, M. F. Powell and M. J. Newman, eds., “Vaccine Design (the subunit and adjuvant approach),” Plenum Press (NY, 1995). Pharmaceutical compositions and vaccines within the scope of the present invention may also contain other compounds, which may be biologically active or inactive. For example, one or more immunogenic portions of other CMV antigens may be present, either incorporated into a fusion polypeptide or as a separate compound, within the composition or vaccine.

[0120] Illustrative vaccines may contain recombinant HCMV or RhCMV DNA encoding one or more of the polypeptides as described above, such that the polypeptide is generated in situ. Appropriate nucleic acid expression systems contain the necessary DNA sequences for expression in the patient (such as a suitable promoter and terminating signal). In a preferred embodiment, the DNA may be introduced using a HCMV or RhCMV expression system, which may involve the use of attenuated or altered CMV vectors. Techniques for incorporating DNA into such expression systems are well known to those of ordinary skill in the art. The DNA may also be “naked,” as described, for example, in Ulmer et al., Science 259:1745-1749, 1993 and reviewed by Cohen, Science 259:1691-1692, 1993. The uptake of naked DNA may be increased by coating the DNA onto biodegradable beads, which are efficiently transported into the cells. It will be apparent that a vaccine may comprise both a polynucleotide and a polypeptide component. Such vaccines may provide for an enhanced immune response.

[0121] It will be apparent that a vaccine may contain pharmaceutically acceptable salts of the polynucleotides and polypeptides provided herein. Such salts may be prepared from pharmaceutically acceptable non-toxic bases, including organic bases (e.g., salts of primary, secondary and tertiary amines and basic amino acids) and inorganic bases (e.g., sodium, potassium, lithium, ammonium, calcium and magnesium salts).

[0122] While any suitable carrier known to those of ordinary skill in the art may be employed in the vaccine compositions of this invention, the type of carrier will vary depending on the mode of administration. Compositions of the present invention may be formulated for any appropriate manner of administration, including for example, topical, oral, nasal, intravenous, intracranial, intraperitoneal, subcutaneous or intramuscular administration. For parenteral administration, such as subcutaneous injection, the carrier preferably comprises water, saline, alcohol, a fat, a wax or a buffer. For oral administration, any of the above carriers or a solid carrier, such as mannitol, lactose, starch, magnesium stearate, sodium saccharine, talcum, cellulose, glucose, sucrose, and magnesium carbonate, may be employed. Biodegradable microspheres (e.g., polylactate polyglycolate) may also be employed as carriers for the pharmaceutical compositions of this invention. Suitable biodegradable microspheres are disclosed, for example, in U.S. Pat. Nos. 4,897,268; 5,075,109; 5,928,647; 5,811,128; 5,820,883; 5,853,763; 5,814,344 and 5,942,252. Modified hepatitis B core protein carrier systems are also suitable, such as those described in WO/99 40934, and references cited therein, all incorporated herein by reference. One may also employ a carrier comprising the particulate-protein complexes described in U.S. Pat. No. 5,928,647, which are capable of inducing a class I-restricted cytotoxic T lymphocyte responses in a host.

[0123] Such compositions may also comprise buffers (e.g., neutral buffered saline or phosphate buffered saline), carbohydrates (e.g., glucose, mannose, sucrose or dextrans), mannitol, proteins, polypeptides or amino acids such as glycine, antioxidants, bacteriostats, chelating agents such as EDTA or glutathione, adjuvants (e.g., aluminum hydroxide), solutes that render the formulation isotonic, hypotonic or weakly hypertonic with the blood of a recipient, suspending agents, thickening agents and/or preservatives. Alternatively, compositions of the present invention may be formulated as a lyophilizate. Compounds may also be encapsulated within liposomes using well known technology.

[0124] Any of a variety of immunostimulants may optionally be employed in the vaccines of this invention. For example, an adjuvant may be included. Most adjuvants contain a substance designed to protect the antigen from rapid catabolism, such as aluminum hydroxide or mineral oil, and a stimulator of immune responses, such as lipid A, Bortadella pertussis or Mycobacterium tuberculosis derived proteins. Suitable adjuvants are commercially available as, for example, Freund's Incomplete Adjuvant and Complete Adjuvant (Difco Laboratories, Detroit, Mich.); Merck Adjuvant 65 (Merck and Company, Inc., Rahway, N.J.); AS-2 (SmithKline Beecham, Philadelphia, Pa.); aluminum salts such as aluminum hydroxide gel (alum) or aluminum phosphate; salts of calcium, iron or zinc; an insoluble suspension of acylated tyrosine; acylated sugars; cationically or anionically derivatized polysaccharides; polyphosphazenes; biodegradable microspheres; monophosphoryl lipid A and quil A. Cytokines, such as GM-CSF or interleukin-2, -7, or -12, may also be used as adjuvants.

[0125] Within the context of the HCMV-based and RhCMV-based vaccine vectors provided herein, the adjuvant composition is optional, but if included, is preferably designed to induce an immune response predominantly of the Th1 type. High levels of Th1-type cytokines (e.g., IFN-γ, TNFα, IL-2 and IL-12) tend to favor the induction of cell mediated immune responses to an administered antigen. In contrast, high levels of Th2-type cytokines (e.g., IL-4, IL-5, IL-6 and IL-10) tend to favor the induction of humoral immune responses. Following application of a vaccine as provided herein, a patient will support an immune response that includes Th1- and Th2-type responses. Within a preferred embodiment, in which a response is predominantly Th1-type, the level of Th1-type cytokines will increase to a greater extent than the level of Th2-type cytokines. The levels of these cytokines may be readily assessed using standard assays. For a review of the families of cytokines, see Mosmann and Coffman, Ann. Rev. Immunol. 7:145-173, 1989.

[0126] Preferred adjuvants for use in eliciting a predominantly Th1-type response include, for example, a combination of monophosphoryl lipid A, preferably 3-de-O-acylated monophosphoryl lipid A (3D-MPL), together with an aluminum salt. MPL adjuvants are available from Corixa Corporation (Seattle, Wash.; see U.S. Pat. Nos. 4,436,727; 4,877,611; 4,866,034 and 4,912,094). CpG-containing oligonucleotides (in which the CpG dinucleotide is unmethylated) also induce a predominantly Th1 response. Such oligonucleotides are well known and are described, for example, in WO 96/02555, WO 99/33488 and U.S. Pat. Nos. 6,008,200 and 5,856,462. Immunostimulatory DNA sequences are also described, for example, by Sato et al., Science 273:352, 1996. Another preferred adjuvant is a saponin, preferably QS21 (Aquila Biopharmaceuticals Inc., Framingham, Mass.), which may be used alone or in combination with other adjuvants. For example, an enhanced system involves the combination of a monophosphoryl lipid A and saponin derivative, such as the combination of QS21 and 3D-MPL as described in WO 94/00153, or a less reactogenic composition where the QS21 is quenched with cholesterol, as described in WO 96/33739. Other preferred formulations comprise an oil-in-water emulsion and tocopherol. A particularly potent adjuvant formulation involving QS21, 3D-MPL and tocopherol in an oil-in-water emulsion is described in WO 95/17210.

[0127] Other preferred adjuvants include Montanide ISA 720 (Seppic, France), SAF (Chiron, California, United States), ISCOMS (CSL), MF-59 (Chiron), the SBAS series of adjuvants (e.g., SBAS-2 or SBAS-4, available from SmithKline Beecham, Rixensart, Belgium), Detox (Corixa, Hamilton, Mont.), RC-529 (Corixa, Hamilton, Mont.) and other aminoalkyl glucosaminide 4-phosphates (AGPs), such as those described in pending U.S. patent application Ser. Nos. 08/853,826 and 09/074,720, the disclosures of which are incorporated herein by reference in their entireties. Other preferred adjuvants comprise polyoxyethylene ethers, such as those described in WO 99/52549A1.

[0128] Any vaccine provided herein may be prepared using well known methods that result in a combination of vector, optional immune response enhancer and a suitable carrier or excipient. The compositions described herein may be administered as part of a sustained release formulation (i.e., a formulation such as a capsule, sponge or gel (composed of polysaccharides, for example) that effects a slow release of compound following administration). Such formulations may generally be prepared using well known technology (see, e.g., Coombes et al., Vaccine 14:1429-1438, 1996) and administered by, for example, oral, rectal or subcutaneous implantation, or by implantation at the desired target site. Sustained-release formulations may contain a polypeptide, polynucleotide or antibody dispersed in a carrier matrix and/or contained within a reservoir surrounded by a rate controlling membrane.

[0129] Carriers for use within such formulations are biocompatible, and may also be biodegradable; preferably the formulation provides a relatively constant level of active component release. Such carriers include microparticles of poly(lactide-co-glycolide), polyacrylate, latex, starch, cellulose, dextran and the like. Other delayed-release carriers include supramolecular biovectors, which comprise a non-liquid hydrophilic core (e.g. a cross-linked polysaccharide or oligosaccharide) and, optionally, an external layer comprising an amphiphilic compound, such as a phospholipid (see e.g., U.S. Pat. No. 5,151,254 and PCT applications WO 94/20078, WO/94/23701 and WO 96/06638). The amount of active compound contained within a sustained release formulation depends upon the site of implantation, the rate and expected duration of release and the nature of the condition to be treated or prevented.

[0130] Any of a variety of delivery vehicles may be employed within pharmaceutical compositions and vaccines to facilitate production of an antigen-specific immune response that targets CMV-infected cells. Delivery vehicles include antigen presenting cells (APCs), such as dendritic cells, macrophages, B cells, monocytes and other cells that may be engineered to be efficient APCs. Such cells may, but need not, be genetically modified to increase the capacity for presenting the antigen, to improve activation and/or maintenance of the T cell response, to have anti-CMV effects per se and/or to be immunologically compatible with the receiver (i.e., matched HLA haplotype). APCs may generally be isolated from any of a variety of biological fluids and organs and may be autologous, allogeneic, syngeneic or xenogeneic cells.

[0131] Certain preferred embodiments of the present invention use dendritic cells or progenitors thereof as antigen-presenting cells. Dendritic cells are highly potent APCs (Banchereau and Steinman, Nature 392:245-251, 1998) and have been shown to be effective as a physiological adjuvant for eliciting prophylactic or therapeutic immunity (see Timmerman and Levy, Ann. Rev. Med. 50:507-529, 1999). In general, dendritic cells may be identified based on their typical shape (stellate in situ, with marked cytoplasmic processes (dendrites) visible in vitro), their ability to take up, process and present antigens with high efficiency and their ability to activate naïve T cell responses. Dendritic cells may, of course, be engineered to express specific cell-surface receptors or ligands that are not commonly found on dendritic cells in vivo or ex vivo, and such modified dendritic cells are contemplated by the present invention. As an alternative to dendritic cells, secreted vesicles antigen-loaded dendritic cells (called exosomes) may be used within a vaccine (see Zitvogel et al., Nature Med. 4:594-600, 1998).

[0132] Dendritic cells and progenitors may be obtained from peripheral blood, bone marrow, lymph nodes, spleen, skin, umbilical cord blood or any other suitable tissue or fluid. For example, dendritic cells may be differentiated ex vivo by adding a combination of cytokines such as GM-CSF, IL-4, IL-13 and/or TNFα to cultures of monocytes harvested from peripheral blood. Alternatively, CD34 positive cells harvested from peripheral blood, umbilical cord blood or bone marrow may be differentiated into dendritic cells by adding to the culture medium combinations of GM-CSF, IL-3, TNFα, CD40 ligand, LPS, flt3 ligand and/or other compound(s) that induce differentiation, maturation and proliferation of dendritic cells.

[0133] Dendritic cells are conveniently categorized as “immature” and “mature” cells, which allows a simple way to discriminate between two well characterized phenotypes. However, this nomenclature should not be construed to exclude all possible intermediate stages of differentiation. Immature dendritic cells are characterized as APC with a high capacity for antigen uptake and processing, which correlates with the high expression of Fcγ receptor and mannose receptor. The mature phenotype is typically characterized by a lower expression of these markers, but a high expression of cell surface molecules responsible for T cell activation such as class I and class II MHC, adhesion molecules (e.g., CD54 and CD11) and costimulatory molecules (e.g., CD40, CD80, CD86 and 4-1BB).

[0134] APCs may generally be transfected with a polynucleotide encoding a CMV, HIV, SIV or TB protein (or portion or other variant thereof) such that the CMV, HIV, SIV or TB polypeptide, or an immunogenic portion thereof, is expressed on the cell surface. Such transfection may take place ex vivo, and a composition or vaccine comprising such transfected cells may then be used for therapeutic purposes, as described herein. Alternatively, a gene delivery vehicle that targets a dendritic or other antigen presenting cell may be administered to a patient, resulting in transfection that occurs in vivo. In vivo and ex vivo transfection of dendritic cells, for example, may generally be performed using any methods known in the art, such as those described in WO 97/24447, or the gene gun approach described by Mahvi et al., Immunology and cell Biology 75:456-460, 1997. Antigen loading of dendritic cells may be achieved by incubating dendritic cells or progenitor cells with the CMV polypeptide, DNA (naked or within a plasmid vector) or RNA; or with antigen-expressing recombinant bacterium or viruses (e.g., vaccinia, fowlpox, adenovirus or lentivirus vectors). Prior to loading, the polypeptide may be covalently conjugated to an immunological partner that provides T cell help (e.g., a carrier molecule). Alternatively, a dendritic cell may be pulsed with a non-conjugated immunological partner, separately or in the presence of the polypeptide.

[0135] Vaccine vectors and pharmaceutical compositions may be presented in unit-dose or multi-dose containers, such as sealed ampoules or vials. Such containers are preferably hermetically sealed to preserve sterility of the formulation until use. In general, formulations may be stored as suspensions, solutions or emulsions in oily or aqueous vehicles. Alternatively, a vaccine or pharmaceutical composition may be stored in a freeze-dried condition requiring only the addition of a sterile liquid carrier immediately prior to use.

### Immunotherapeutic Applications

[0136] In further aspects of the present invention, the compositions described herein may be used for immunotherapy of HIV, SIV and TB infections. Within such methods, pharmaceutical compositions and vaccines are typically administered to a patient. As used herein, a “patient” refers to any warm-blooded animal, preferably a human. The above pharmaceutical compositions and vaccines may be used to prophylactically prevent or ameliorate the extent of infection by HIV, SIV or TB or to treat a patient already infected with HIV, SIV or TB. Administration may be by any suitable method, including administration by intravenous, intraperitoneal, intramuscular, subcutaneous, intranasal, intradermal, anal, vaginal, topical, and oral routes.

[0137] Within preferred embodiments, immunotherapy is active immunotherapy, in which treatment relies on the in vivo stimulation of the endogenous host immune system to react against HIV, SIV or TB infection with the administration of immune response-modifying agents (such as polypeptides and polynucleotides as provided herein).

[0138] Routes and frequency of administration of the therapeutic compositions described herein, as well as dosage, will vary from individual to individual, but may be readily established using standard techniques. In one embodiment, between 1 and about 10 doses may be administered over a 52 week period. In another embodiment, about 6 doses are administered, at intervals of about 1 month, and serial vaccinations are optionally given periodically thereafter. Alternate protocols may be appropriate for individual patients.

[0139] A suitable dose is an amount of a compound that, when administered as described above, is capable of promoting an anti-HIV/SIV/TB immune response, and is preferably at least 10-50% above the basal (i.e., untreated) level. Such response can be monitored, for example, by measuring the anti-HIV/SIV/TB antibodies in a patient. Such vaccines should also be capable of causing an immune response that leads to an improved clinical outcome (e.g., more frequent remissions, complete or partial or longer disease-free survival) in vaccinated patients as compared to non-vaccinated patients. In general, for pharmaceutical compositions and vaccines comprising one or more polypeptides, the amount of each polypeptide sought in a dose ranges from about 25 μg to 5 mg per kg of host. Suitable dose sizes will vary with the size of the patient, but will typically range from about 0.1 mL to about 5 mL.

[0140] In general, an appropriate dosage and treatment regimen provides the active compound(s) in an amount sufficient to provide therapeutic and/or prophylactic benefit. Such a response can be monitored by establishing an improved clinical outcome (e.g. more frequent remissions, complete or partial, or longer disease-free survival) in treated patients as compared to non-treated patients. Increases in preexisting immune responses to a HIV/SIV/TB protein may correlate with an improved clinical outcome. Such immune responses may generally be evaluated using standard proliferation, cytotoxicity or cytokine assays, which may be performed using samples obtained from a patient before and after treatment.

### Example 1

### CMV was Demonstrated to have Utility as a Vaccine Vector for Prevention and/or Treatment of, e.g., HIV, SUV, TB, etc.

### Rationale/Premise:

[0141] Unique Characteristics of HIV/SIV Infection. HIV and its non-human primate (NHP) counterpart SIV share a pattern of infection and a constellation of pathobiologic features that in the vast majority of susceptible hosts results in unremitting infection, progressive immunodeficiency, and ultimately, death (1-4). This progression occurs despite clear-cut cellular and humoral anti-viral immune responses (5, 6), and clinical situations consistent with immune control of untreated HIV/SIV infection are relatively unusual, difficult to confirm as immunologic in nature, and more often than not, impermanent 7-12). Several fundamental features of the virus likely contribute to the relentless, immune “resistant” nature of these infections. First, HIV/SIV infect the immune system and by both direct and indirect mechanisms, progressively disrupt its physiology (4, 13-17). The clinical hallmark of HIV/SIV infection is, of course, CD4+ T cell depletion, but the total effect of these viruses on the immune system is pervasive, ultimately affecting the function of almost all components of the system. Moreover, these effects are cumulative and reinforcing; they initiate early in infection and eventuate in a progressive spiral of immune dysfunction (16). The pathophysiology, in addition to loss of peripheral CD4+ T cells and its extended effects on CD8+ T cell and B cell function, HIV/SIV induces, inter alia, a generalized state of hyperactivation with attendant deleterious effects on both CD4+ and CD8+ T cell homeostasis and function, thymocyte infection and thymus destruction, macrophage infection and associated damage/dysfunction of peripheral immune microenvironments (14, 17). The inevitable end result of sustained viral replication is therefore progressive degradation of immune capabilities including, most notably, the ability of the anti-viral immunity to control the virus itself (18-20).

[0142] Immune control of HIV/SIV is also impeded by a second feature of these viruses—specific evolutionary adaptations to avoid neutralizing antibody responses, including 1) concealing conserved, functionally important structures within the interior of the prefusogenic env glycoprotein trimers, 2) hiding them by glycosylation, 3) using conformation flexibility to undermine the development of high affinity Abs to discontinuous, potentially neutralization-sensitive epitopes, and 4) decoy immunogenicity (directing most of the antibody response to irrelevant epitopes) (21, 22). Thus, despite the fact that neutralizing antibody can in certain experimental circumstances protect against viral challenge (see below), in most natural infections the antibody response that develops is thought to be relatively ineffective.

[0143] Third, the high replication capability and genetic mutability of these lentiviruses allows their rapid response to almost any selection pressure, increasing adaptation to changing host conditions, and resulting in viral variants with enhanced pathogenicity (23-26), or diminished susceptibility to anti-viral immunity (27-31). Thus, unless an immune response is directed at a functionally critical, invariant segment of a viral gene product, simultaneously targets a broad array of epitopes with potent effector activity, and/or is present early enough in infection so as to precede the explosive population growth and production of viral variants upon which selection operates, the high replication and mutation rate of HIV/SIV will ensure the outgrowth of a sufficiently fit viral variant so as to maintain progressive infection. In most infections, conditions for immune control are not met, and the virus appears to rapidly escape those effective responses that do arise.

[0144] Finally, these viruses can achieve true latency-long-term, genetically silent infection with the potential for re-activation and full expression of their infectious program (32, 33). The existence of such a latent pool of genetically diverse viral genomes suggests that at this point of understanding, cure of HIV/SIV is almost certainly not achievable, and that an apparently controlled infection always has the potential for re-ignition and renewed pathogenicity with any decline in activity of the controlling mechanisms.

[0145] Impact of Immunity to HIV/SIV During Natural Infection Provides Rationale For Aspects of the Present Invention. The question is, therefore, not whether immune responses to HIV/SIV develop—they certainly do (5, 6, 22, 34, 35)—but rather, whether such responses impact viral replication and disease progression. Definitive immune correlates of protection in slowly progressive vs. rapidly progressive disease have been difficult to identify, and even when associations are confirmed, there is the issue of cause and effect in an immunosuppressive virus; that is, does a strong immune response control the virus, or does a non-aggressive infection due to virologic or non-immune host factors simply lead to better preservation of the anti-HIV immune response (9)? The overarching question is whether any general realization of immune control of viral replication with lifelong arrest of disease progression is achievable. Given the difficulty in finding clear-cut examples of immunity in natural infection, and the impressive capability of these viruses to evade immunity, our chances would appear to be slim. However, new lines of evidence, primarily in the SIV-rhesus macaque (RM) experimental model, have more convincingly supported the concept of “effective” anti-lentivirus immunity. Indeed, the evidence cited above for rapid immune escape in SIV infection—the specific modification of the infecting cloned virus in those parts of its genome encoding recognized CTL epitopes (27, 29)—is fundamentally prima facie evidence of effective (albeit, not protective) immunity. For immune escape to occur, the SIV-specific, CD8+ T cell response in question must have successfully suppressed the original epitope-bearing viral species. Evidence for such immune-mediated viral adaptation has also been found in human HIV infection (36), and these data, when combined with strong HLA class I allele correlations with disease progression (37, 38), make a persuasive case for CD8+ T cell function in HIV infection. The ongoing participation of CD8+ T cells in determination of viral replication levels is also supported by data in the RM model indicating enhancement of SIV replication following mAb-mediated CD8+ cell depletion, including during primary infection, chronic infection, and the period of viral control following transient post-inoculation anti-retroviral treatment (39-43). Even more convincing is the emerging data demonstrating the ability of newer vaccine protocols, which are largely focused on the generation of CTL responses, to protect against pathogenic challenge with certain SIV strains (44-60). While these data, discussed in more detail below, need to be interpreted in the context of the specific challenge model used, they provide ‘proof of principle’ that a strong cellular immune response can control these viruses for extended periods of time.

[0146] Finally, there is the question of humoral immunity. Genetic changes in the env gene which result in neutralization escape appear to occur in HIV/SIV infection (22, 61), but given the frequency of env modifications in these viruses and the fact that env structure controls other aspects of pathogenicity (e.g., the nature of ‘target’ cell populations; 62), it is difficult to determine whether these changes reflect actual immune selection. Several groups have reported successful prophylaxis of SIV/HIV hybrid (SHIV) infection with immediate post-challenge treatment with neutralizing Abs (3-66), but such treatment has not been shown to be effective in established infections (67), perhaps due to cell-to-cell transmission of the virus. Thus, at this point, there remains consensus that a strong ‘pre-positioned’ (e.g., vaccine-induced) neutralizing antibody response could significantly contribute to the critical initial control of infecting virus, but means by which such responses might be reliably generated remained to be determined; that it, until aspects of the present invention.

[0147] SIV/SHIV vaccines-Prior Progress. Efforts to develop a prophylactic AIDS vaccine commenced with the discovery of HIV in 1983-84. However, early failures of vaccine strategies based on conventional approaches (e.g., primarily designed to generate antibody responses, before the complexities of env structure and function were known) sent the field ‘back to the drawing board’ (68-71). The isolation of SIV from monkeys with AIDS-like illness in 1985, and the subsequent development of SIV and SHIV models in various macaque species offered a viable alternative to expensive and slow clinical studies (52, 72, 73) and the field has largely accepted ‘proof of principle’ studies in the SIV/macaque model to both define the basic immunologic features of lentiviral infection, and to provide a rapid testing ground for various vaccine strategies. The SHIV (hybrid) models were especially attractive, as the use of HIV env seemed to offer more relevance to HIV infection in humans. A number of vaccine approaches, including attenuated (e.g., gene segment-deleted) SIVs, DNA alone, DNA and replication-deficient vaccinia (e.g., MVA) or adenovirus vectors, or viral vectors alone (vaccinia, adenovirus, vesicular stomatitis virus) (the DNAs and non-SIV vectors encoding various SIV or HIV open reading frames (ORFs)), have elicited cellular (±humoral) immune responses that have been associated with viremia control and protection from disease in such SHIV challenges (44-51). While these studies have demonstrated the central importance of cellular immunity, specifically CD8+ CTL, in effective anti-viral responses, and have provided the ‘proof of principle’ that immunologic control of some model lentiviral infections is possible, their relevance to HIV infection has recently been questioned (74). To date, pathogenic SHIVs are CXCR4-utilizing viruses (most SIVs and transmitted HIVs are CCR5-utilizing), and the SHIV89.6P virus most commonly used as a vaccine model elicits rapid CD4+ T cell depletion (likely because its CXCR4 co-receptor utilization allows it to infect/destroy both naïve and memory T cells, as opposed to the memory T cell tropism of CCR5-utilizing viruses), and causes the acute onset of an AIDS-like illness and early death (not the chronic progressive course of typical AIDS/SAIDS). It has been noted that SHIV89.6P is unusually sensitive to antibody neutralization, and that animals that survive the acute pathogenicity of SHIV89.6P infection often manifest a relatively benign course (74, 75) (even without vaccination; L. Picker and M. Axthelm, personal observations). Thus, vaccines that exert control during acute infection, preventing the initial, dramatic CD4+ T cell depletion of acute SHIV89.6P infection, may allow for the development of a uniquely protective antibody response which would then mediate long-term protection with this challenge (with occasional viral escape and renewed pathogenicity (76). Although the tempo of progression of pathogenic SIV infection (SIVmac239, mac251, smE660) is accelerated as compared to HIV infection of human (52), the chronic, progressive pathogenicity of these CCR5-utilizing viruses is thought to more closely reflect that of HIV (74, 75). Challenge models using these viruses have shown some efficacy for several of the vaccine approaches mentioned above (52-60), although a recent study has shown that while high level T cell immunity generated by a DNA/MVA prime boost protocol significantly blunted the viremia of primary SIVmac239 infection, by 12 weeks post infection, viral replication of the vaccinated animals was no different from that of the controls (75). It should also be noted that most challenges are identical or substantially homologous to the SIV components of the vaccine, and sequence heterogeneity in field strains of HIV will likely reduce the effectiveness of current vaccine strategies even further (77).

[0148] Significantly, among the myriad vaccine strategies tested in the SIV models to date, the strategy with the best track record for containment of highly pathogenic and even heterologous challenge in diverse NHPs is the ‘gene segment-deleted’ attenuated SIV approach (51, 78-82, 134). Unfortunately, the effectiveness of these attenuated SIV vaccines appears to directly correlate with their potential for in vivo growth and pathogenicity (e.g., modest attenuation is optimal; increasing attenuation undermines protection), raising serious safety issues and undermining the viability of prior art attenuation strategies for production of human HIV vaccines (79, 83). Nevertheless, the ability of attenuated SIV infections to elicit such effective protection against R5-tropic, chronic-aggressive SIV challenge offers lessons for development of alternative vaccine strategies. While it is not possible to completely rule out a role for viral interference, innate immunity, or other virus-induced changes in target cell number or susceptibility that undermines the establishment of the pathogenic challenge (86-89), recent evidence strongly suggests that the induction and maturation of humoral (nAb) and cellular (CTL) anti-SIV immune responses correlates with their efficacy (Schmitz, J. et al., Abstract #15, 21^{st} Annual Symposium on NHP Models for AIDS, Oct. 24, 2003). The inability of other vaccine strategies (e.g., DNA, heterologous vectors; prime-boost protocols) to recapitulate the efficacy of attenuated SIV vaccines (despite having as large or larger T cell response frequencies) suggests there might be differences in the ‘quality’ of the responses that are elicited by these approaches.

[0149] Importance of chronicity and other factors. One obvious potential mechanism for such differences is the chronicity of exposure of the vaccinee immune system to Ag, a potential requirement for the generation, maturation and maintenance of a quantitatively and functionally appropriate immune response against a persistent, elusive lentivirus. The observation that attenuated SIV infections appear to require weeks to months for protective responses to mature (134) is in keeping with this idea. Non-replicating viral vectors or vectors that are ultimately eliminated or highly contained by anti-vector immune responses would not be expected to provide such sustained exposure. Other possibilities include: 1) the route of Ag exposure or location(s) of vector infection (e.g., current vectors might not provide sufficient mucosal immunity), or 2) the adjuvant characteristics of the vector (e.g., the provision of regulatory signals that provoke an appropriate mix of effector responses). The bottom line is that current approaches, though improving, might lack key characteristics that will be necessary for a ‘field-effective’ HIV vaccine, warranting serious consideration of alternative approaches.

[0150] Therefore, according to aspects of the present invention, and as will be discussed in the following sections, the β-herpesvirus CMV possesses unique immunogenicity and virologic characteristics that provide substantial utility as a vaccine vector for persistent pathogens such as SIV/HIV, TB, etc.

[0151] Pathobiology and Immunology of CMV Infection. Cytomegaloviruses (CMVs) comprise a distinct, widely distributed subgroup of β-herpes viruses that share common growth characteristics, characteristic cytopathology, salivary gland tropism and a capacity to establish persistent and latent infection (90). Among the largest and most complex of known viruses, CMV virions range in size from 150-200 nm and include a double stranded DNA genome of 230 kb—capable of coding for more than 200 proteins (90). The β-herpes viruses in general, and the CMVs in specific, are thought to have emerged prior to mammalian radiation, and therefore, viral evolution has accompanied mammalian speciation such that each species has their own uniquely adapted CMV, and CMV relatedness generally parallels species relatedness. Thus, the genetics and biology of primate CMVs (human, chimp, RM) are considerably more closely related to each other than to rodent CMVs (see below). In both humans in developing counties and in RM, CMV infection is essentially universal with 90-100% of adults showing serologic evidence of infection (91-93). In affluent areas of developed countries, increased hygiene has somewhat limited transmission with only 40-60% of the adult population showing seroreactivity. For the vast majority of exposed (immunologically normal) subjects, either human or monkey, acute infection with CMV is completely asymptomatic (91, 94, 95); a small fraction of humans (<5%) experience symptomatic, but benign illness, and an even smaller fraction experience a mononucleosis syndrome (CMV accounts for ˜8% of all cases of mononucleosis) (91, 94). After initial infection, CMV is shed for months to years in multiple body fluids (saliva, tears, urine, genital secretions, breast milk), and transmission generally involves mucosal exposure to such fluids, and not surprisingly occurs in situations where such secretion ‘transfer’ is common (early childhood and adolescence) (91, 96, 97). CMV persists in the host indefinitely and viral shedding can occur years after exposure. CMV can manifest latent infection of its target cells (90, 98), and like other herpes viruses, this capability likely plays a role in this remarkable persistence. However, unlike herpes simplex and varicella-zoster virus, the frequency of shedding (particularly in monkeys (97)), the kinetics of reactivation after transplantation (99), and the unique strength of the T cell response (see below) suggest that foci of active CMV replication are frequently, if not continuously, occurring somewhere in the infected host's body. Such active persistence implies a means for evading host immunity, and indeed, CMV has evolved diverse mechanisms for manipulating both innate and adaptive immune responses, including genes that modulate/interfere with 1) Ag presentation and other major histocompatibility complex (MHC) protein function, 2) leukocyte migration, activation and cytokine responses, 3) Fc receptor function, and 4) host cell susceptibility to apoptosis induction 100-105). These sophisticated immune evasion strategies might explain CMV's ability to re-infect immune hosts (106, 107, and see below).

[0152] Despite this impressive persistence and immune evasion, and despite CMV's ability to replicate in a wide variety of cell types (90), overt disease in chronic CMV infection is exceedingly rare. Indeed, given its essentially apathogenic nature in normal children and adults, CMV would likely be an obscure virus, if not for the discovery in the 1950s of its involvement with fetal/neonatal cytomegalic inclusion disease—an important medical problem because of its associated damage to the CNS and sensory organs—and later, its appearance as one of the most common and devastating opportunistic pathogens in the settings of organ/bone marrow transplantation and AIDS (91). These situations have one striking commonality-immunodeficiency, particularly in cell-mediated immunity, related to immunologic immaturity, pharmacologic immunosuppression (transplantation), or the progressive immunodeficiency of HIV infection. This well-characterized relationship between immunity and CMV disease suggests that CMV infection exemplifies a complex host-parasite relationship in which a delicate balance has been evolutionarily ‘negotiated’ between viral mechanisms of pathogenesis, persistence, and immune evasion and the host immune response. In essence, the virus is not eliminated from the host and has relatively free rein to replicate in excretion sites; yet host immunity restricts replication in most sites—those in which such replication would lead to disease. With this balance, the virus enjoys pervasiveness in a large host population that could not occur with unchecked pathogenicity. As for the host, the ability of a normal immune system to essentially eliminate pathogenicity within reproductively relevant members of the population suggests that the support of this ‘pathogen’ does not pose a significant evolutionary handicap. It should be acknowledged that this relationship is not without peril for even immunologically normal hosts. CMV infection has been suggested to be a risk factor for atherosclerosis, and although it is neither necessary nor sufficient for the development of this condition, there is growing evidence that it might be one contributing factor, of many, to the development of this vascular disease (91).

### Results (See Also Example 2 Herein Below)

[0153] Although the immunologic requirements for maintaining this host-virus balance are not yet well characterized, the immunologic ‘resources’ specifically devoted to CMV are known to be quite large. The median CD4+ T cell response frequencies to human CMV (HCMV) are 5-10 fold higher than the median CD4+ T cell response frequencies to (whole) non-persistent viruses such as mumps, measles, influenza, and adenovirus, and even other persistent viruses such as herpes simplex and varicella-zoster viruses (34, 108-114). High frequency CD8+ T cell responses to particular HCMV epitopes or ORFs are also typical (115-118). Applicants have quantified total blood CD4+ and CD8+ T cell responses to the entire CMV genome (using ˜14,000 overlapping peptides, cytokine flow cytometry, and a large cohort of HLA-disparate CMV-seropositive subjects). To date, applicants have ‘interrogated’ all of these peptides (217 ORF mixes) in 24 CMV sero+ and 5 sero− subjects and have found that when totaled, the median frequencies of CMV-specific CD4+ and CD8+ T cells in CMV-sero+ subjects are 5-6% for the total CD4+ or CD8+ T cell populations (which corresponds to 10-11% of the memory populations) (FIG. 1) (The total responses in sero− subjects are less than 0.5%, a number that represents the ‘background’ of this summation analysis). Astonishingly, in some individuals, CMV-specific T cells account for more than 25% of the memory T cell repertoire in peripheral blood. This T cell response is broad—each subject recognizes an average of 19 HCMV ORFs (˜equally distributed among CD4 and CD8 responses), and at least 28 ORFs provoke significant CD4+ or CD8+ T cell responses (≧0.2% of peripheral blood memory population) in 20% or more of the subjects tested. The precise mechanisms by which these large CMV-specific T cell populations are generated and maintained following infection are not understood, but probably relate to the ability of this virus to maintain infection, including active, productive infection in local microenvironments, in the face of a substantial immune response over the life of the host. In addition, CMV is capable of re-infecting fully immune hosts (106, 107), and applicants have shown in the RM model (see below) that experimental re-infection significantly increases steady state frequencies of CMV-specific T cells, indicating that periodic re-infection plays a central role in the extraordinary build-up of CMV-specific T cell response frequencies. Finally, the abilities of HCMV to infect professional Ag-presenting cells (macro-phages, dendritic cells) (119), and produce abundant dense bodies (enveloped tegument protein complexes that can ‘infect’ target cells but lack genetic material) (90) might contribute to the generation of these robust T cell responses.

[0154] Importantly, the characteristics of the antiviral antibody response to HCMV mirror those mentioned above for antiviral T cell immunity. HCMV-specific antibody responses are notable for their reactivity with a large number of viral proteins and by the persistence of stable titers against viral proteins for decades (120-123). Antibodies specific for HCMV-encoded proteins, including those against structural proteins made only during virus replication, develop rapidly after primary infection and are maintained at significant titers, likely because of the persistent expression of virus-encoded proteins (120, 124). Antibody specific for HCMV is also present on mucosal surfaces, perhaps as a result of the tropism of this virus for secretory glands. Interestingly, anti-HCMV antibody responses also boost following both community-acquired re-infections and re-infections in transplant recipients.

[0155] The rhesus macaque (RM) model of CMV infection. As indicated above, RM, the most utilized animal model of lentivirus (SIV) infection (52, 72, 125), display a natural CMV infection that closely mimics human infection with HCMV in terms of epidemiology, patterns of infection and disease in immunocompetent and immunodeficient hosts, particularly including RhCMV's role as a major opportunistic pathogen of SIV-infected monkeys (95, 126-131). Not surprisingly, this biologic relatedness is reflected by genetic relatedness. Early work revealed high homology between the HCMV genes gB, IE1 and UL121-117 and their RhCMV homologues (132, 133). Applicants recently obtained and analyzed the complete sequence of RhCMV strain 68.1, and identified 236 potential ORFs of 100 or more amino acids that are positionally arranged in similar fashion as their HCMV counterparts. Of these 236 ORFs, 138 (58.47%) are clearly homologous to known HCMV proteins. Some of the RhCMV that are homologous to HCMV orfs known to be nonessential for replication in fibroblasts are listed in TABLE 1 below. These orfs, according to aspects of the present invention are preferred sites for insertion of pathogenic antigens to for expression in the inventive CMV-based vaccine vectors.

[0156] In comparison, murine CMV encodes 170 ORFS, of which 78 (45.9%) are homologous to known HCMV proteins. Importantly, in contrast to murine CMV, RhCMV encodes a full complement of HCMV-like immune evasion genes, and tegument proteins with sufficient homology to HCMV to form dense bodies.

[0157] TABLE 1. Representative examples of RhCMV ORFs with homologues in the HCMV genome. Each annotated RhCMV ORF, as well as several previously unrecognized ORFs Rh35a and Rh160a), was compared to the full set of HCMV ORFs using the BlastP algorithm. Scores with a significance of ≦10⁻⁵ were considered matches. If more than one RhCMV ORF corresponded to an HCMV ORF (e.g., R111 and 112 are homologous to UL83) the RhCMV ORF was excluded from the list. Nine of the RhCMV ORFs have been mutated by insertion of a transposon, and insert sites are indicated. The Rh151/2 ORFs correspond to the spliced HCMV UL118/9 ORFs.

| RhCMV orfs | HCMV orfs | RhCMV mutant |
|---|---|---|
| Rh01 | RL1 | |
| Rh05 | UL153 | |
| Rh17 | UL4 | |
| Rh19 | UL7 | |
| Rh20 | UL6 | |
| Rh31 | UL13 | |
| Rh33 | UL14 | 25698, 25739 |
| Rh35a | UL19 | |
| Rh36 | UL20 | |
| Rh40 | UL23 | 31242 |
| Rh42 | UL24 | 31782, 32619 |
| Rh43 | UL25 | 33323, 33711 |
| Rh54 | UL31 | |
| Rh56 | UL33 | |
| Rh59 | UL35 | |
| Rh68 | UL42 | |
| Rh69 | UL43 | 54274 |
| Rh72 | UL45 | 57859, 58210 |
| Rh107 | UL78 | |
| Rh123 | UL88 | 122332, 122472 |
| Rh143 | UL111A | |
| Rh148 | UL116 | |
| Rh151/2 | UL118/9 | |
| Rh155 | UL121 | 155860 |
| Rh158 | UL147 | |
| Rh159 | UL148 | 165110 |
| Rh160 | UL132 | |
| Rh160a | UL130 | |
| Rh162 | UL145 | |
| Rh163 | UL144 | |
| Rh164 | UL141 | |
| Rh181 | US1 | |
| Rh182 | US2 | |
| Rh184 | US3 | |
| Rh189 | US11 | |
| Rh190 | US12 | |
| Rh192 | US13 | |
| Rh198 | US17 | |
| Rh199 | US18 | |
| Rh200 | US19 | |
| Rh201 | US20 | |
| Rh202 | US21 | |
| Rh203 | US22 | |
| Rh221 | US29 | |
| Rh223 | US30 | |
| Rh225 | US31 | |

[0158] Basically, BlastP was used to search the RhCMV genome for ORFs that are homologous to HCMV ORFs known to be nonessential for replication in fibroblasts. These nonessential HCMV ORFs were identified: (i) from the literature; (ii) from transposon mutagenesis of the AD169 strain of HCMV; and (iii) from the fact that they are in clinical isolates but not the AD169 laboratory strain. A total of 48 RhCMV ORFs met these criteria and they are listed in TABLE 1. The HCMV homologues of three of these ORFs (Rh182, 184 and 189) are known to be immuno-modulatory genes, and three additional immunomodulatory ORFs (Rh185, Rh186 and Rh187) were not identified in applicants' BlastP analysis because their HCMV homologues were deleted during the BAC cloning of the clinical HCMVs that were sequenced. To confirm the relationship between the RhCMV and HCMV ORFs, ClustalW was used to perform multiple sequence alignments. Each RhCMV ORF was compared to the corresponding ORFs from four clinical isolates of HCMV This analysis demonstrated that each RhCMV ORF has an orthologue in all four HCMV clinical isolates that have been sequenced, and it confirmed that the ORFs from the rhesus and human viruses are indeed related, ruling out the possibility that the original BlastP scores resulted from short homologies in otherwise unrelated proteins.

[0159] In particular exemplary vectors, two gene blocks are deleted: Rh182-189, which contains homologues to known HCMV immuno-modulatory genes, and Rh158-166, which contains genes that are present in clinical isolates but missing in laboratory strains of HCMV.

[0160] RhCMV ORFs that lack an HCMV homologue, or that correspond to an HCMV gene that is known to be essential or to augment replication in cultured fibroblasts are, according to the present invention disfavored for purposes of RhCMV and HCMV vaccine vector design.

[0161] The homology between HCMV and RhCMV infections extends to their respective immune responses as well. As shown below and in FIGS. 2A and 2B, the RM T cell response to RhCMV in peripheral blood is similar to that in the human in both size and the CMV ORFs targeted. Moreover, the increased accessibility of the RM model has allowed investigation on the frequencies of these RhCMV-specific T cells in tissue sites, and the immunologic response to RhCMV re-infection. With regard to the former, as illustrated in FIG. 2C, the representation of CMV-specific T cells in the memory repertoire at the pulmonary tissue:air interface can be truly enormous, often more than 10-fold higher than in peripheral blood. With regard to the latter, inoculation of CMV-immune RM with live (but not inactivated) wildtype RhCMV results in a dramatic boosting of CMV-specific T cell (both CD4+ and CD8+) and Ab responses (FIG. 3). The boosted Ab titres appear to return to baseline after about 2 months, but importantly, the peripheral blood frequencies of CMV-specific CD4+ and CD8+ T cells appear to stabilize at levels 50-100% higher than their previous baseline-suggesting periodic re-infections or overt re-activations substantially contribute to the high frequency of RhCMV-specific T cells observed in most adult RM.

[0162] CMV as a vaccine vector for HIV/SIV. According to particular aspects of the present invention, many of the recognized characteristics of CMV make this virus highly attractive as a vaccine vector, particularly for SIV and HIV. First and foremost, CMV's capability to elicit strong Ab responses and enormous T cell responses, focused on mucosal sites (FIG. 2) is of obvious relevance to SIV/HIV host defense (see below). Applicants emphasize that these strong responses reflect a steady state situation, maintained indefinitely, rather than the post-boost peak responses that are often highlighted in prior art vaccine studies.

[0163] Second, CMV has the ability to re-infect immune hosts, and generate new immune responses with such re-infections (106, 107). To confirm this phenomenon directly with RhCMV, applicants constructed a particular RhCMV vector embodiment encoding SIV gag (FIG. 4A). This vector showed clear-cut gag expression by both immunofluorescence (FIG. 4B) and western blot, and demonstrated in vitro growth kinetics indistinguishable from that of wildtype virus. When subcutaneously administered (5×10⁶ pfu) to 4 RhCMV seropositive RM (224 days after primary infection), a similar (clinically aymptomatic) boosting of the RhCMV-specific T cell and Ab response as described in FIG. 3 was observed. As applicants had previously observed in re-infection (FIG. 3), real time PCR did not identify RhCMV, either wildtype or the gag-recombinant, in blood or lung lavage mononuclear cells at any time point following viral inoculation. However, urine from day 127 post re-infection was weakly positive for gag expression by ELISA, suggesting the presence of the RhCMV-gag vector. These samples were co-cultured to isolate RhCMV, and these in vivo-derived viral preparations were assessed for gag expression by western blot. As shown in FIG. 5, RhCMV co-cultures from all 4 animals expressed immunoreactive gag, definitively establishing the presence of the administered recombinant virus in secretory sites. Retrospective analysis of urine at earlier post-re-infection time points revealed the presence of the gag-expressing RhCMV vector by day 7 in one RM and by day 21 in the other 3. Moreover, the gag-expressing RhCMV vector has also been detected in saliva, and remains present in urine at least through day 237 post re-infection.

[0164] These data have two critical implications. First, they unequivocally demonstrate that CMV is capable of re-infecting immune subjects, effectively competing with pre-existent wildtype virus, and somehow finding its way to its usual ‘ecological’ niche despite strongly boosted cellular and humoral immunity directed at CMV. Second, they demonstrate the in vivo stability of RhCMV vectors expressing exogenous neoAgs, indicating that these vectors are able to persistently infect inoculated subjects, and indefinitely maintain expression of the inserted, exogenous Ag-encoding genes.

[0165] This RhCMV-gag re-infected cohort was also used to assess the ability of RhCMV vectors to initiate a de novo immune response in the face of the massive CMV-specific memory boost associated with re-infection.

[0166] As shown in FIGS. 6A and 6C, all inoculated RM developed gag-specific CD4+ and CD8+ T cell responses in blood, as early as day 7 post re-infection. These blood responses peaked in the first month following re-infection at 0.2%-0.6% of memory cells, declining thereafter to a stable plateau in the 0.1%-0.2% range. SIV gag-specific Abs were also induced by day 14 pi, increasing through day 91 pi, prior to achieving a stable plateau (FIG. 6D). Re-administration of the same RhCMV-gag vector (@ day 238 post re-infection) dramatically boosted both examined), these responses remained higher than the previous ‘set points,’ suggesting establishment of higher plateau levels. Significantly, as previously shown for RhCMV-specific T cell responses, blood frequencies of these CMV-vectored gag-specific T cell responses substantially (>10×) underestimated the frequency of SIV-specific T cells in a tissue effector site—the lung (FIGS. 6B and 6C). Gag-specific CD4+ and CD8+ T cells were found in lung lavage fluid by day 7 post the initial RhCMV(gag) re-infection in all RM, peaking with frequencies as high as 10% (day 42-56 post re-infection) before achieving stable plateau levels in the 1%-3% range. Boosting (second re-infection) resulted in a sharp spike in these frequencies with return to the previous plateau level in 2 RM, and what appear to be (at day 70 post re-infection #2) slightly higher plateau levels in the other 2 animals. Significantly, the frequency and distribution of gag-specific T cells in these RhCMV(gag)-immunized RM are comparable to what applicants have observed in RM ‘immunized’ with attenuated SIVmac239(Δnef) that effectively controlled I.V. challenge with wildtype SIVmac239 (FIG. 7). It should also be noted that in all of the RM studied, the observed gag-specific responses occurred in the setting of significant boosting of the RhCMV-specific responses (FIG. 6A; indeed, it is possible these recall CMV-specific responses acted as an adjuvant for the new gag-specific response). Significantly, these data demonstrate the ability of RhCMV to function effectively as a vector for neoAgs in RhCMV-immune RM.

[0167] According to particular aspects of the present invention, the unique ability of CMV to effectively ‘vector’ neoAg responses in CMV-immune subjects has several highly significant implications for their utility in a HIV/SIV vaccine. First, by virtue of the fact that any healthy CMV+ subjects have operationally demonstrated their ability to control wildtype CMV infection, their risk of morbidity after administration of CMV vectors, even vectors based on an otherwise unmodified CMV genome, would be expected to be minimal. Although fetuses of CMV+ mothers can in some circumstances be infected (106), this risk can be averted by simply not providing CMV-based vaccines to pregnant females. Incorporation of safety (e.g., inducible suicide) mechanisms and/or strategic gene deletion (so as to reduce pathogenic potential without sacrificing immunogenicity and persistence) would be expected to reduce the possibility of vaccine morbidity even further. It should also be noted that other well-studied herpes viruses that could potentially be used as persistent and perhaps re-infection capable vectors have one or more features that mitigate against such use. For example, the γ-herpes viruses Epstein Barr Virus (EBV) and Kaposi's Sarcoma Herpes Virus (KSHV) are firmly associated with malignancies, whereas CMV is not. Additionally, α herpes viruses (herpes simplex) lack the generalized T cell immunogenicity of CMV and because of neurovirulence (e.g., herpes encephalitis) would appear to have considerable more pathogenic potential in otherwise immunocompetent individuals.

[0168] The second implication of CMV's re-infection capability and applicants demonstration that a subsequent inoculation with the same RhCMV vector elicits a strong immunologic boost to the recombinant (SIV) gene product (FIG. 6C) is that, unlike essentially all other viral vectors currently in use or in development, CMV vectors can likely be used repeatedly. Indeed, according to particular embodiments of the present invention, individuals are serially vaccinated with different CMV vectors so as to generate responses to new epitopes, and broadening the vaccinee's response repertoire to, for example, encompass HIV clade/strain variation.

[0169] Significance. As reviewed above, HIV's and SIV's remarkable ability to replicate, generate variants, and evolve past any selective pressure in days to weeks poses a substantial barrier for the immunologic control of this infection by vaccination. By all accounts, the most effective way, if not the only way, to immunologically contain HIV/SIV is to strongly attack it early, in tissue sites of first invasion, when the viral population is small viral genetic variation is at a minimum, and the host's immunologic capabilities have not been degraded. In natural infection, the immune response almost always lags behind explosive viral replication, never catches up, and is progressively degraded by viral pathogenicity.

[0170] However, according to particular aspects of the present invention, a CMV-driven, anti-HIV/SIV immune response (e.g., in place at the time of HIV/SIV exposure) is sufficient to contain viral replication, blunt the initial viral diaspora, prevent immunopathogenicity, and establish a non-progressive infection. Aspects of the present invention co-opt CMV's eons of evolution, and provide strategically engineered and optimized CMV as an HIV/SIV ORF-encoding vaccine vector. CMV's combination of 1) remarkable immunogenicity, 2) low pathogenicity, 3) persistence, 4) widespread tissue dissemination, and 5) the ability to re-infect CMV+ hosts is substantially and fundamentally different from other AIDS vaccine vectors in development, making this a truly novel approach to the AIDS vaccine problem. Indeed, the issue of persistence, by itself, makes this approach substantially worthy. According to particular aspects, long-term Ag exposure, as is possible with the inventive CMV-based vaccine vectors, correlates with a qualitatively different and functionally superior anti-lentiviral immune response.

[0171] For safety considerations, CMV vectors, with all their unique potential, must be handled appropriately. Therefore, in preferred aspects, the inventive CMV-based vaccination vectors are used to elicit neoAg immunity in CMV+ hosts, who have—by their healthy, CMV+ status—established their ability to contain this virus. Although no live virus vector is without risk, in the appropriate setting (say in the context of demonstrably immunocompetent, CMV+ pre-adolescents), the risk of serious CMV vector pathogenicity, even with non-safety modified vectors, should be minimal. Certainly, in a population at high risk of HIV infection, any CMV vaccine-related morbidity would pale in comparison to the devastation wrought by AIDS (consider sub-Saharan Africa where early establishment of chronic CMV infection is nearly universal, and the incidence of HIV infection is up to 30%). Applicants point out that a live HCMV vaccine developed by MedImmune (formerly Aviron) is in phase 1 clinical trials at the present time. This HCMV vaccine is designed to prevent neonatal CMV infection, a serious problem, but one that is not nearly of the magnitude of the AIDS epidemic. It is important to note that the MedImmune vaccine is intended for CMV-naïve individuals, whose potential for symptomatic disease is much higher than for the CMV-infected/immune individuals targeted by applicants present vaccine embodiments. Finally, according to further aspects of the present invention, even the relatively low disease-inducing potential of wildtype CMV is abrogatable by genetic manipulation of the CMV vector without sacrificing immunogenicity or persistence.

[0172] According to aspects of the present invention, CMV vectors, alone or in combination with other modalities, provide qualitatively superior cellular and humoral immune responses against pathogenic R5-tropic SIV such that such challenges are significantly contained. Additional aspects provide safe vectors without sacrificing the unique persistence and re-infection capabilities. According to yet further aspects, various CMV genes are deletable without sacrificing vector function, and particular inventive vectors use the genomic ‘space’ created by such deletions for insertion of safety constructs (e.g., inducible suicide mechanisms) as well as larger (poly-cistronic), SIV or HIV gene encoding cassettes. This gene deletion approach is designed to retain the balance between immunogenicity/persistence and pathogenicity, and exploits the redundancy of CMV's adaptations in providing engineered RhCMV optimized vectors.

[0173] In preferred aspects, RhCMV vectors are designed to reflect genes and biology that are homologous to HCMV, and optimized RhCMV vector designs are directly applicable to construction of HCMV vector embodiments.

### Example 2

### Preferred HCMV and RhCMV Vectors

[0174] Particular aspects provide recombinant RhCMV/SIV vectors, HCMV/HIV vectors, and HCMV/TB vectors that can be growth-modulated in vivo (e.g., by oral administration of the antibiotic doxycycline). Heterologous antigen expression may be under the control of promoters of different kinetic classes with respect to the CMV infection cycle (e.g., EF1α—constitutive; MIE—immediate early; pp65—early; gH—late).

[0175] In particular embodiments, RhCMV/SIV, HCMV/HIV and HCMV/TB vectors lack immune modulatory genes (e.g., Rh158-166 and Rh182-189) to enhance vector immunogenicity, safety and heterologous gene carrying capacity of the vector. For example, HCMV encodes at least four different gene products, gpUS2, gpUS3, gpUS6 and gpUS11 that interfere with antigen presentation by MHC I (37). All four HCMV MHC evasion molecules are encoded in the unique short region of HCMV and belong to the related US6 gene family. Additional HCMV immunomodulators include, but are not limited to UL118, UL119, UL36, UL:37, UL111a, UL146, UL147, etc.). Likewise, RhCMV contains analogous immune modulatory genes, that can be deleted or modified to enhance vector immunogenicity, safety and heterologous gene carrying capacity of the inventive vaccine vectors.

[0176] In additional embodiments, RhCMV/SIV, HCMV/HIV and HCMV/TB are further optimized for anti-SIV/HIV/TB immunogenicity by insertion of multiple antigen genes (e.g., gag, env, retanef fusion). Alternatively, several vectors, each having a single inserted antigen may be used for co-administration.

[0177] In additional embodiments, RhCMV/SIV, HCMV/HIV and HCMV/TB vectors contain LoxP sites (e.g., RhCMV/SIVgagLoxPCre) strategically placed in the CMV genome to flank an essential region of the viral genome, in combination with a tetracycline (Tet)-regulated Cre recombinase. Following immunization, doxycycline (Dox)-mediated induction of Cre recombinase enables in vivo inactivation of RhCMV/SIVgagLoxPCre by cleavage at the LoxP sites.

[0178] Construction and Characterization of the RhCMV BAC. The development of BAC technology to clone large segments of genomic DNA coupled with sophisticated λ phage-based mutagenesis systems has revolutionized the field of herpes virology enabling genetic approaches to analyze the virus. Applicants have used this system, for example, to construct an RhCMV BAC(RhCMV BAC-Cre) containing the complete RhCMV strain 68-1 genome. The RhCMV BAC-Cre was derived from an infectious, pathogenic RhCMV 68-1/EGFP recombinant virus (16). RhCMV BAC-Cre contains a BAC cassette inserted at a single LoxP site within the Rh181 (US1)/Rh182 (US2) intergenic region of RhCMVvLoxP. Insertion of the BAC cassette at this site results in the generation of LoxP sequences flanking the cassette. As the BAC cassette contains a Cre gene that is expressed in eukaryotic cells, transfection of this ‘self-excising’ RhCMV BAC-Cre into fibroblasts results in efficient excision of the BAC cassette, reconstituting virus (designated RhCMVvLoxP). Characterization of the growth of the BAC-reconstituted virus (RhCMVvLoxP) in vitro and in vivo demonstrates that the various genetic manipulations did not alter the WT properties of the virus. The genomic structure of RhCMVvLoxP is identical to that of WT RhCMV except for the residual LoxP site. The presence of the LoxP sequence does not alter the expression profiles of neighboring Rh181 (US1) and Rh182 (US2) or distal (IE2) genes. RhCMVvLoxP replicates with WT kinetics both in tissue culture and in RhCMV seronegative immunocompetent RMs (n=2). Analysis of tissues from one animal terminated at 6 months post-inoculation demonstrated the presence of both RhCMV DNA and IE1-expressing cells in the spleen, consistent with the persistent gene expression observed in previous studies with WT virus. Both RMs developed vigorous anti-RhCMV antibody titers comparable to those observed in naturally infected animals. Taken together, these observations demonstrate that RhCMVvLoxP is phenotypically WT and is suitable to construct site-specific alterations for the development of vaccine vectors.

[0179] Construction of RhCMV/SIVmac239gag. The presence of the single functional LoxP site located in the intergenic region between Rh181 (US1) and Rh182 (US2) of RhCMVvLoxP was exploited to utilize a Cre recombinase/LoxP system for construction of recombinant virus. For this approach, pSIVmac239gag plasmid was used as a source of template for PCR amplification of the SIVmac239gag cassette. The SIVmac239gag cassette contains the cellular EF1a promoter driving expression of the SIVmac239gag gene. The EF1a promoter is a highly active promoter that is constitutively active in all cell types tested and is expected to result in high cell type independent expression of the gag gene. PCR amplification was performed using primers designed to incorporate a single LoxP site at either end of the amplified SIVmac239gag cassette. For recombination, the PCR product containing the SIVmac239gag cassette flanked by LoxP sites was transfected into RM fibroblasts. At 24 hours post-transfection, these cells were infected with RhCMVvLoxP at a multiplicity of infection (MOI) of 1. The infection was allowed to progress until extensive cytopathic effect was observed. At this time, virus-infected cells were harvested and used to infect fresh fibroblasts, which were then overlayed with agarose to prevent viral spread through the culture. After approximately two weeks, individual viral plaques were picked, and each plaque was used to infect fresh fibroblasts. Total cell lysates were then screened for the presence of the SIVmac239gag gene by PCR. SIVmac239gag-positive cell lysates were then sonicated, serial diluted and used to infect fresh fibroblasts. The process was repeated thrice, after which time, plaque-purified virus clones were screened for gag gene expression by northern blot analysis of total RNA obtained from infected cells (data not shown). The presence of Gag protein expression was confirmed by western analysis as well as immunofluorescence in EC and MDM). The entire SIVmac239gag cassette was sequenced to confirm sequence integrity of the inserted cassette. The growth kinetics of gag-positive clones were compared to WT virus and a single RhCMV/SIVmac239gag recombinant virus with WT growth characteristics and high levels of gag expression was selected.

[0180] At day 224 post-primary infection, RhCMV/SIVmac239gag was subcutaneously administered to a cohort of 4 RhCMV-seropositive RM. As we have previously observed in re-infection studies, real-time PCR did not detect RhCMV, either WT or RhCMV/SIVmac239gag, in blood or lung lavage mononuclear cells at any time point following viral inoculation. However, urine from day 127 post re-infection was weakly positive for gag expression by ELISA suggesting the presence of RhCMV/SIVmac239gag. These samples were co-cultured to isolate RhCMV, and these in vivo-derived viral preparations were assessed for gag expression by western blot. As shown in FIG. 5, RhCMV co-cultures from all 4 animals expressed gag, definitively establishing the presence of RhCMV/SIVmac239gag virus at these epithelial secretory sites. Retrospective analysis of urine at earlier post-re-infection time points revealed the presence of the gag-expressing RhCMV vector in urine by day 7 in one RM and by day 21 in the other 3 (data not shown). Moreover, gag-expressing RhCMV was also present in saliva, and remained present in urine at least through day 237 post re-infection. Significantly, re-infection of this RhCMV/SIVmac239gag clone induced a mucosally-oriented, gag-specific CD4+ and CD8+ T cell response, as well as a gag-specific antibody response (see FIGS. 6B, 6C and 6D). These data unequivocally demonstrate that CMV is capable of re-infecting immune subjects, effectively competing with pre-existent WT virus, and establishing infection at normal sites within the host, despite strongly boosted cellular and humoral immunity directed at CMV. They also demonstrate the high in vivo stability of RhCMV vectors expressing exogenous heterologous antigens, suggesting that these vectors may be able to persistently infect inoculated subjects and indefinitely maintain expression of the inserted, exogenous antigen-encoding genes. Finally, they demonstrate that recombinant RhCMV can elicit both T cell and Ab responses to exogenous proteins in the setting of re-infection, and thus has the potential to serve as an effective vaccine vector in individuals with pre-existing CMV immunity.

### Exemplary HCMV and RhCMV Vaccine Vectors.

[0181] FIG. 9 schematically shows construction of RhCMV and HCMV vaccine vectors according to particular aspects of the present invention. Heterologous pathogen antigen(s) are inserted into RhCMV or HCMV bacterial artificial chromosomes (BACs) by E/T and Flp-mediated recombination. The schematic shows, for example, a generalized strategy for insertion of an epitope-tagged pathogen antigen into the non-coding region between rh213 and Rh214 of RhCMV. This strategy can be similarly used for insertion of heterologous pathogen antigens at other defined sites within the RhCMV/HCMV genome, as well as insertion of multiple antigens at single or multiple sites within the genome. The gene encoding the epitope-tagged pathogen antigen is inserted into the BAC genome using E/T recombination. Following selection of recombinant BACs on the basis of antibiotic resistance (in this case, Kan), the resistance gene is removed by Flp-mediated recombination. Recombinant RhCMV and HCMV vaccine vectors are reconstituted by transfection of recombinant BACs into RhCMV/HCMV permissive cells (AgX, pathogen antigen; Tag, epitope tag; pA, polyadenylation site; Kan, kanamycin resistance gene for selection in bacteria).

[0182] FIG. 10 shows, according to particular aspects, an exemplary tetracycline-regulated RhCMV/HCMV ‘safety’ vaccine vector. This RhCMV/HCMV safety vector contains two interactive genetic components within the RhCMV/HCMV genome that together enable Tet-induced vector inactivation. A Tet-inducible Cre recombinase gene (Cre) inserted within the viral genome enables induction of Cre recombinase expression by treatment with the Tet homologue, doxycycline (Dox)(D). This Tet-regulated system is comprised of a Tet-sensitive reverse-transactivator (rtTA2^{s}-M2) (TA2), a Tet-transrepressor (tTS-kid) (TS) and a tetO₇-CMV minimal promoter unit (white arrow) driving Cre-recombinase expression. The second component necessary for Tet-induced inactivation is a pair of LoxP sites located within the viral genome to flank a region of the genome essential for virus replication (in this case, Rh52-Rh156). In the absence of Dox, the binding of tTS-kid and lack of binding of rtTA2′-M2 to the tetO₇-CMV minimal promoter unit prevents Cre-recombinase expression. In the absence of Cre recombinase, the integrity of the RhCMV/HCMV genome is maintained and the virus replicates normally. Addition of Dox results in the allosteric modulation of tTS-kid and rtTA2^{S}-M2 that results in the activation of Cre recombinase expression. Cre recombinase inactivates the RhCMV/HCMV vaccine vectors by catalysing the excision of the region of the viral genome flanked by loxP sites (in this case, Rh52-Rh156). For simplicity, genes expressing rtTA2^{s}-M2 and tTS-kid as well as the gene expressing the heterologous pathogen antigen are not shown.

[0183] FIG. 11 shows another exemplary tetracycline-regulated RhCMV/HCMV ‘safety’ vaccine vector. Such RhCMV/HCMV vaccine vectors are constructed by placing a gene essential for virus replication, (in this example, Rh70 (HCMV homologue-UL44); DNA polymerase processivity factor), under control of the Tet-inducible system described in FIG. 10. The Rh70 HCMV homologue (UL44) was initially selected as this gene has been shown to be essential for CMV replication (Shenk PNAS 100: 12396, 2003; Ripalti A J. Virol. 1995 69:2047). However, other essential viral genes can be used as candidate genes for Tet-mediated regulation. Regulation of Rh70 expression or expression of other essential RhCMV/HCMV genes by the Tet-regulated system enables control of virus replication by varying Dox level. To place the essential gene under Dox control, the 5′ upstream region of the gene is replaced with the tetO₇-CMV minimal promoter unit (white arrow). After inoculation of animals with Tet-regulated vectors in the presence of Dox, virus replication can be inactivated simply by Dox withdrawal. Tet-regulated vectors are constructed by E/T and Flp-based recombination as detailed in FIG. 9.

[0184] FIG. 12 shows yet another exemplary tetracycline-regulated RhCMV/HCMV ‘safety’ vaccine vector. Such RhCMV/HCMV vaccine vectors are constructed containing a cytotoxic gene (CytoG) under control of the Tet-inducible system as detailed in FIG. 11. After inoculation of animals with Tet-regulated vectors in the absence of Dox, virus replication can be rapidly inactivated by Dox-mediated induction of the cytopathic gene resulting in death of the vaccine vector-infected cell.

[0185] In further aspects, RhCMV and HCMV gene therapy vectors are provided. FIG. 13 schematically shows construction of exemplary RhCMV and HCMV gene therapy vectors. Therapeutic gene(s) are inserted into RhCMV or HCMV bacterial artificial chromosomes (BACs) by E/T and Flp-mediated recombination. The schematic shows a generalized strategy for insertion of an epitope-tagged therapeutic gene into the non-coding region between rh213 and Rh214 of RhCMV. This strategy can be similarly used for insertion of therapeutic genes at other defined sites within the RhCMV/HCMV genome. The gene encoding the epitope-tagged replacement gene is inserted into the BAC genome using E/T recombination. Following selection of recombinant BACs on the basis of antibiotic resistance (in this case, Kan), the resistance gene is removed by Flp-mediated recombination. Recombinant RhCMV and HCMV gene therapy vectors are reconstituted by transfection of recombinant BACs into RhCMV/HCMV permissive cells (ThG, therapeutic gene; Tag, epitope tag; pA, polyadenylation site; Kan, kanamycin resistance gene for selection in bacteria).

[0186] Exemplary sequences useful in the construction and/or design of the inventive RhCMV and HCMV vaccine vectors are summarized in Table 3 below. According to aspects of the present invention, a variety to HCMV and RhCMV types and strains have utility if the inventive compositions and methods for treating and/or preventing HIV, SIV, TB, etc.

TABLE 3
Listing of SEQ ID NOs and respective names

| | |
|---|---|
| SEQ ID NO: 1 | RhCMV (Cercopithecine herpesvirus 8) |
| SEQ ID NO: 2 | HCMV (AD169 lab strain) |
| SEQ ID NO: 3 | HCMV (wild type strain Merlin) |
| SEQ ID NO: 4 | Towne BAC HCMV isolate |
| SEQ ID NO: 5 | PH-BAC HCMV isolate |
| SEQ ID NO: 6 | Toledo-BAC HCMV isolate |
| SEQ ID NO: 7 | TR-BAC HCMV isolate |
| SEQ ID NO: 8 | FIX-BAC HCMV isolate |
| SEQ ID NO: 9 | AD 169-BAC HCMV isolate |
| SEQ ID NO: 10 | SIV |
| SEQ ID NO: 11 | SIV Gag-Pol |
| SEQ ID NO: 12 | SIV gag protein |
| SEQ ID NO: 13 | SIV vif protein |
| SEQ ID NO: 14 | SIV vpx protein |
| SEQ ID NO: 15 | SIV envelope protein |
| SEQ ID NO: 16 | SIV nef protein |
| SEQ ID NO: 17 | HIV type 1 |
| SEQ ID NO: 18 | HIV-1 Gag-Pol |
| SEQ ID NO: 19 | HIV-1 Pr55 (Gag) |
| SEQ ID NO: 20 | HIV-1 Vif |
| SEQ ID NO: 21 | HIV-1 Vpr |
| SEQ ID NO: 22 | HIV-1 Tat |
| SEQ ID NO: 23 | HIV-1 Rev |
| SEQ ID NO: 24 | HIV-1 Vpu |
| SEQ ID NO: 25 | HIV-1 Envelope surface glycoprotein gp160, precursor |
| SEQ ID NO: 26 | HIV-1 Nef |
| SEQ ID NO: 27 | HIV type 2 |
| SEQ ID NO: 28 | HIV-2 gag-pol fusion polyprotein |
| SEQ ID NO: 29 | HIV-2 gag polyprotein |
| SEQ ID NO: 30 | HIV-2 vif protein |
| SEQ ID NO: 31 | HIV-2 vpx protein |
| SEQ ID NO: 32 | HIV-2 vpr protein |
| SEQ ID NO: 33 | HIV-2 tat protein |
| SEQ ID NO: 34 | HIV-2 rev protein |
| SEQ ID NO: 35 | HIV-2 env polyprotein |
| SEQ ID NO: 36 | HIV-2 nef protein |

### Example 3

### Treatment and/or Prevention of TB

[0187] The search for a new and improved vaccine against tuberculosis (TB) is an active field of research, which has benefited tremendously from the completed Mycobacterium tuberculosis genome and the progress in molecular biology and computer science (Andersen & Doherty, Microbes and Infection, 2005 in press).

[0188] Nonetheless, the only currently available vaccine against tuberculosis (TB), bacillus Calmette-Guérin (BCG), was derived from the virulent organism Mycobacterium bovis, a close relative of Mycobacterium tuberculosis, by growing it in vitro for 13 years until it lost the ability to cause disease in inoculated individuals. More than 3 billion people have received BCG, which makes this vaccine the most widely used in the world.

[0189] However, the safety aspects, loss of sensitivity to tuberculin as a diagnostic reagent, and varying efficacy in different trials of BCG are of great concern. While BCG likely protects children efficiently against the early manifestations of TB, estimates of protection against adult pulmonary TB have ranged from 0% to 80% based on large well-controlled field trials. This suggests that globally, BCG prevents only ˜5% of all potentially vaccine-preventable deaths due to TB, and its impact on the global TB epidemic has been negligible. A novel, effective vaccination strategy against adult pulmonary TB has therefore become an international research priority.

[0190] While most of these novel strategies are based on one or a few antigens, the BCG vaccine is a very complex vaccine that theoretically provides the immune system with more than 4000 different antigens. As a live attenuated vaccine, BCG furthermore stimulates the immune system for prolonged periods of time and it is therefore not surprising that in general these novel vaccines have had difficulty surpassing BCG's activity in animal models of TB—something that has not altered noticeably over recent decades. To include antigens that give rise to beneficial responses and exclude potential detrimental components is the ultimate advantage provided by subunit vaccines but the safety profile and possible incorporation of a TB subunit vaccine into existing pediatric vaccines also makes the subunit approach very attractive. The field is now moving towards combining important antigens to increase the coverage and efficacy of the vaccine (Id).

[0191] Therefore, particular aspects of the present invention provide compositions and methods for the treatment of tuberculosis (TB). TABLE 2 shows a list of representative vaccine-relevant TB antigens recognized by human T cells for use in the present inventive methods and compositions.

[0192] Particular aspects provide a method for treatment or prevention of TB, comprising infection of a subject in need thereof with at least one recombinant HCMV vector comprising an expressible TB antigen or a variant or fusion protein thereof. Preferably, the subject is an immunocompetent, TB seropositive subject. Preferably, TB antigen is selected from the group consisting of ESAT-6, Ag85A, AG85B, MPT51, MPT64, CFP10, TB10.4, Mtb8.4, hspX, CFP6, Mtb12, Mtb9.9 antigens, Mtb32A, PstS-1, PstS-2, PstS-3, MPT63, Mtb39, Mtb41, MPT83, 71-kDa, PPE 68, LppX, and antigenic portions, variants and fusion proteins thereof.

[0193] In particular embodiments, the method further comprises serial re-infection with at least one recombinant HCMV vector comprising an expressible TB antigen or a variant or fusion protein thereof. Preferably, in such embodiments, the expressible TB antigen, or variant or fusion protein thereof, of the serial re-infection vector is different than that of the initial infection vector.

[0194] In particular embodiments of the above methods, expression is driven by an antigen encoding sequence in operable association with a promoter selected from the group consisting of a constitutive CMV promoter, an immediate early CMV promoter, an early CMV promoter and a late CMV promoter. Preferably, the promoter is selected from the group consisting of EF1-alpha, MIE, pp65 and gH.

[0195] Also provided is a recombinant HCMV vaccine vector, comprising an expressible TB antigen or a variant or fusion protein thereof. Preferably, the virus comprises suicide means. In certain embodiments, expression is driven by an antigen encoding sequence in operable association with a promoter selected from the group consisting of a constitutive CMV promoter, an immediate early CMV promoter, an early CMV promoter and a late CMV promoter. Preferably, the promoter is selected from the group consisting of EF1-alpha, MIE, pp65 and gH.

[0196] Further provided are pharmaceutical compositions, comprising, along with a pharmaceutically acceptable carrier or excipient, a recombinant HCMV comprising an expressible TB antigen or a variant or fusion protein thereof. Preferably, in such compositions, the recombinant HCMV vaccine vector comprises suicide means.

TABLE 2
Representative vaccine-relevant TB antigens recognized by human
T cells for use in the present inventive methods and compositions.

| Antigen | Sanger ID |
|---|---|
| ESAT-6 | Rv3875 |
| Ag85A | Rv3804c |
| AG85B | Rv1886c |
| MPT51 | Rv3803c |
| MPT64 | Rv1980c |
| CFP10 | Rv3874 |
| TB10.4 | Rv0288 |
| Mtb8.4 | Rv1174c |
| hspX | Rv2031c |
| CFP6 | Rv3004 |
| Mtb12 | Rv2376c |
| Mtb9.9 antigens | Rv1793, MT3721, Rv1198, Rv1037c, |
| | Rv3619c |
| Mtb32A | Rv0125 |
| PstS-1 | Rv0934 |
| PstS-2 | Rv0932c |
| PstS-3 | Rv0928 |
| MPT63 | Rv1926c |
| Mtb39 | Rv1196 |
| Mtb41 | Rv0915c |
| MPT83 | Rv2873 |
| 71-kDa | Unknown |
| PPE 68 | Rv3873 |
| LppX | Rv2945c, Rv3878, Rv3407, RV1818c |

### LITERATURE CITED

[0197] 1. Grovit-Ferbas, K., T. Pappas, and W. A. O'Brien, Human Immunodeficiency Virus, in Persistent Viral Infections, R. Ahmed and A. I. Chen, Editors. 1999, John Wiley & Sons: Chicester. p. 3-45.
[0198] 2. McChesney, M., E. T. Sawai, and C. J. Miller, Simian Immunodeficiency Virus, in Persistent Viral Infections, R. Ahmed and I. S. Chen, Editors. 1999, John Wiley & Sons: Chichester. p. 321-345.
[0199] 3. Cohen, O. J. and A. S. Fauci, Pathogenesis and Medical Aspects of HIV-1 Infection, in Fields Virology, D. M. Knipe and P. M. Howley, Editors. 2001, Lippincott Williams & Wilkins: Philadelphia. p. 2043-2094.
[0200] 4. Levy, J. A., Pathogenesis of human immunodeficiency virus infection. Microbiol. Rev, 1993. 57(1): p. 183-289.
[0201] 5. Desrosiers, R. C., Strategies used by human immunodeficiency virus that allow persistent viral replication. Nat Med, 1999. 5(7): p. 723-5.
[0202] 6. Paul, W. E., Can the immune response control HIV infection? Cell, 1995. 82: p. 177-82.
[0203] 7. Kaul, R., et al., New insights into HIV-1 specific cytotoxic T-lymphocyte responses in exposed, persistently seronegative Kenyan sex workers. Immunol Lett, 2001. 79(1-2): p. 3-13.
[0204] 8. Rosenberg, E. S., et al., Vigorous HIV-1-specific CD4+ T cell responses associated with control of viremia. Science, 1997. 278(5342): p. 1447-50.
[0205] 9. Picker, L. J. and V. C. Maino, The CD4(+) T cell response to HIV-1. Curr Opin Immunol, 2000. 12(4): p. 381-6.
[0206] 10. Harrer, T., et al., Cytotoxic T lymphocytes in asymptomatic long-term nonprogressing HIV-1 infection. Breadth and specificity of the response and relation to in vivo viral quasispecies in a person with prolonged infection and low viral load. J Immunol, 1996. 156(7): p. 2616-23.
[0207] 11. Harrer, T., et al., Strong cytotoxic T cell and weak neutralizing antibody responses in a subset of persons with stable nonprogressing HIV type 1 infection. AIDS Res Hum Retroviruses, 1996. 12(7): p. 585-92.
[0208] 12. Learmont, J. C., et al., Immunologic and virologic status after 14 to 18 years of infection with an attenuated strain of HIV-1. A report from the Sydney Blood Bank Cohort. N Engl J Med, 1999. 340(22): p. 1715-22.
[0209] 13. Shearer, G. M., HIV-induced immunopathogenesis. Immunity, 1998. 9(5): p. 587-93.
[0210] 14. Hazenberg, M. D., et al., T cell depletion in HIV-1 infection: how CD4+ T cells go out of stock. Nat Immunol, 2000. 1(4): p. 285-9.
[0211] 15. McCune, J. M., The dynamics of CD4+ T-cell depletion in HIV disease. Nature, 2001. 410(6831): p. 974-9.
[0212] 16. Douek, D. C., L. J. Picker, and R. A. Koup, T cell dynamics in HIV-1 infection. Annu Rev Immunol, 2002. 21: 265-304.
[0213] 17. Schacker, T. W., et al., Collagen deposition in HIV-1 infected lymphatic tissues and T cell homeostasis. J Clin Invest, 2002. 110(8): p. 1133-1139.
[0214] 18. McMichael, A. J. and S. L. Rowland-Jones, Cellular immune responses to HIV. Nature, 2001. 410(6831): p. 980-7.
[0215] 19. Kostense, S., et al., Persistent numbers of tetramer(+) CD8(+) T cells, but loss of interferon-gamma(+) HIV-specific T cells during progression to AIDS. Blood, 2002. 99(7): p. 2505-11.
[0216] 20. Vogel, T. U., et al., Functional impairment of simian immunodeficiency virus-specific CD8+ T cells during the chronic phase of infection. J Virol, 2001. 75(5): p. 2458-61.
[0217] 21. Wyatt, R. and J. Sodroski, The HIV-1 envelope glycoproteins: fusogens, antigens, and immunogens. Science, 1998. 280(5371): p. 1884-8.
[0218] 22. Parren, P. W., et al., The neutralizing antibody response to HIV-1: viral evasion and escape from humoral immunity. Aids, 1999. 13(Suppl A): p. S137-62.
[0219] 23. Kimata, J. T., et al., Emerging cytopathic and antigenic simian immunodeficiency virus variants influence AIDS progression. Nat Med, 1999. 5(5): p. 535-41.
[0220] 24. Schuitemaker, H., et al., Biological phenotype of human immunodeficiency virus type 1 clones at different stages of infection: progression of disease is associated with a shift from monocytotropic to T-cell-tropic virus population. J Virol, 1992. 66(3): p. 1354-60.
[0221] 25. Blaak, H., et al., In vivo HIV-1 infection of CD45RA(+)CD4(+) T cells is established primarily by syncytium-inducing variants and correlates with the rate of CD4(+) T cell decline. Proc Natl Acad Sci USA, 2000. 97(3): p. 1269-74.
[0222] 26. Scarlatti, G., et al., In vivo evolution of HIV-1 co-receptor usage and sensitivity to chemokine-mediated suppression. Nat Med, 1997. 3(11): p. 1259-65.
[0223] 27. Evans, D. T., et al., Virus-specific cytotoxic T-lymphocyte responses select for amino-acid variation in simian immunodeficiency virus Env and Nef. Nat. Med, 1999. 5(11): p. 1270-6.
[0224] 28. O'Connor, D. H., T. M. Allen, and D. I. Watkins, Cytotoxic T-lymphocyte escape monitoring in simian immunodeficiency virus vaccine challenge studies. DNA Cell Biol, 2002. 21(9): p. 659-64.
[0225] 29. O'Connor, D. H., et al., Acute phase cytotoxic T lymphocyte escape is a hallmark of simian immunodeficiency virus infection. Nat Med, 2002. 8(5): p. 493-9.
[0226] 30. Walker, B. D. and P. J. Goulder, AIDS. Escape from the immune system. Nature, 2000. 407(6802): p. 313-4.
[0227] 31. McMichael, A., T cell responses and viral escape. Cell, 1998. 93(5): p. 673-6.
[0228] 32. Finzi, D., et al., Latent infection of CD4+ T cells provides a mechanism for lifelong persistence of HIV-1, even in patients on effective combination therapy. Nat Med, 1999. 5(5): p. 512-7.
[0229] 33. Saaverda-Lozano. J., et. al., Anti-CD45Ro immunotoxin kills latently infected human immunodeficiency virus (HIV) CD4 T cells in the blood of HIV-positive persons. J Infect Dis, 2002. 185(3): p. 306-14.
[0230] 34. Pitcher, C. J., et al., HIV-1-specific CD4+ T cells are detectable in most individuals with active HIV-1 infection, but decline with prolonged viral suppression. Nat Med, 1999. 5(5): p. 518-25.
[0231] 35. Betts, M. R., et al., Analysis of total human immunodeficiency virus (HIV)-specific CD4(+) and CD8(+) T-cell responses: relationship to viral load in untreated HIV infection. J Virol, 2001. 75(24): p. 11983-91.
[0232] 36. Moore, C. B., et al., Evidence of HIV-1 adaptation to HLA-restricted immune responses at a population level. Science, 2002. 296(5572): p. 1439-43.
[0233] 37. Kaslow, R. A., et al., Influence of combinations of human major histocompatibility complex genes on the course of HIV-1 infection. Nat Med, 1996. 2(4): p. 405-11.
[0234] 38. Carrington, M., et al., HLA and HIV-1: heterozygote advantage and B*35-Cw*04 disadvantage. Science, 1999. 283(5408): p. 1748-52.
[0235] 39. Schmitz, J. E., et al., Control of viremia in simian immunodeficiency virus infection by CD8+ lymphocytes. Science, 1999. 283(5403): p. 857-60.
[0236] 40. Jin, X., et al., Dramatic rise in plasma viremia after CD8(+) T cell depletion in simian immunodeficiency virus-infected macaques. J Exp Med, 1999. 189(6): p. 991-8.
[0237] 41. Metzner, K. J., et al., Effects of in vivo CD8(+) T cell depletion on virus replication in rhesus macaques immunized with a live, attenuated simian immunodeficiency virus vaccine. J Exp Med, 2000. 191(11): p. 1921-31.
[0238] 42. Lifson, J. D., et al., Role of CD8(+) lymphocytes in control of simian immunodeficiency virus infection and resistance to rechallenge after transient early antiretroviral treatment. J Virol, 2001. 75(21): p. 10187-99.
[0239] 43. Matano, T., et al., Administration of an anti-CD8 monoclonal antibody interferes with the clearance of chimeric simian/human immunodeficiency virus during primary infections of rhesus macaques. J Virol, 1998. 72(1): p. 164-9.
[0240] 44. Amara, R. R., et al., Critical role for Env as well as Gag-Pol in control of a simian-human immunodeficiency virus 89.6P challenge by a DNA prime/recombinant modified vaccinia virus Ankara vaccine. J Virol, 2002. 76(12): p. 6138-46.
[0241] 45. Amara, R. R., et al., Control of a mucosal challenge and prevention of AIDS by a multiprotein DNA/MVA vaccine. Science, 2001. 292(5514): p. 69-74.
[0242] 46. Amara, R. R., et al., Different patterns of immune responses but similar control of a simian-human immunodeficiency virus 89.6P mucosal challenge by modified vaccinia virus Ankara (MVA) and DNA/MVA vaccines. J Virol, 2002. 76(15): p. 7625-31.
[0243] 47. Barouch, D. H., et al., Reduction of simian-human immunodeficiency virus 89.6P viremia in rhesus monkeys by recombinant modified vaccinia virus Ankara vaccination. J Virol, 2001. 75(11): p. 5151-8.
[0244] 48. Barouch, D. H., et al., Control of viremia and prevention of clinical AIDS in rhesus monkeys by cytokine-augmented DNA vaccination. Science, 2000. 290(5491): p. 486-92.
[0245] 49. Shiver, J. W., et al., Replication-incompetent adenoviral vaccine vector elicits effective anti-immunodeficiency-virus immunity. Nature, 2002. 415(6869): p. 331-5.
[0246] 50. Rose, N. F., et al., An effective AIDS vaccine based on live attenuated vesicular stomatitis virus recombinants. Cell, 2001. 106(5): p. 539-49.
[0247] 51. Wyand, M. S., et al., Protection by live, attenuated simian immunodeficiency virus against heterologous challenge. J Virol, 1999. 73(10): p. 8356-63.
[0248] 52. Nathanson, N., V. M. Hirsch, and B. J. Mathieson, The role of nonhuman primates in the development of an AIDS vaccine. Aids, 1999. 13(Suppl A): p. S113-20.
[0249] 53. Hel, Z., et al., Containment of Simian Immunodeficiency Virus Infection in Vaccinated Macaques: Correlation with the Magnitude of Virus-Specific Pre- and Postchallenge CD4(+) and CD8(+) T cell Responses. J Immunol, 2002. 169(9): p. 4778-4787.
[0250] 54. Pal, R., et al., ALVAC-SIV-gag-pol-env-based vaccination and macaque major histocompatibility complex class I (A*01) delay simian immunodeficiency virus SIVmac-induced immunodeficiency. J Virol, 2002. 76(1): p. 292-302.
[0251] 55. Benson, J., et al., Recombinant vaccine-induced protection against the highly pathogenic simian immunodeficiency virus SIV(mac251): dependence on route of challenge exposure. J Virol, 1998. 72(5): p. 4170-82.
[0252] 56. Ourmanov, I., et al., Comparative efficacy of recombinant modified vaccinia virus Ankara expressing simian immunodeficiency virus (SIV) Gag-Pol and/or Env in macaques challenged with pathogenic SIV. J Virol, 2000. 74(6): p. 2740-51.
[0253] 57. Crotty, S., et al., Protection against simian immunodeficiency virus vaginal challenge by using Sabin poliovirus vectors. J Virol, 2001. 75(16): p. 7435-52.
[0254] 58. Polacino, P. S., et al., Role of immune responses against the envelope and the core antigens of simian immunodeficiency virus SIVmne in protection against homologous cloned and uncloned virus challenge in Macaques. J Virol, 1999. 73(10): p. 8201-15.
[0255] 59. Polacino, P., et al., Protection of macaques against intrarectal infection by a combination immunization regimen with recombinant simian immunodeficiency virus SIVmne gp 160 vaccines. J Virol, 1999. 73(4): p. 3134-46.
[0256] 60. Shibata, R., et al., Live, attenuated simian immunodeficiency virus vaccines elicit potent resistance against a challenge with a human immunodeficiency virus type 1 chimeric virus. J Virol, 1997. 71(11): p. 8141-8.
[0257] 61. Stipp, H. L., A. Kumar, and O. Narayan, Characterization of immune escape viruses from a macaque immunized with live-virus vaccine and challenged with pathogenic SHIVKU-1. AIDS Res Hum Retroviruses, 2000. 16(15): p. 1573-80.
[0258] 62. Karlsson, G. B., et al., The envelope glycoprotein ectodomains determine the efficiency of CD4+ T lymphocyte depletion in simian-human immunodeficiency virus-infected macaques. J Exp Med, 1998. 188(6): p. 1159-71.
[0259] 63. Parren, P. W., et al., Antibody protects macaques against vaginal challenge with a pathogenic R5 simian/human immunodeficiency virus at serum levels giving complete neutralization in vitro. J Virol, 2001. 75(17): p. 8340-7.
[0260] 64. Baba, T. W., et al., Human neutralizing monoclonal antibodies of the IgG1 subtype protect against mucosal simian-human immunodeficiency virus infection. Nat Med, 2000. 6(2): p. 200-6.
[0261] 65. Shibata, R., et al., Neutralizing antibody directed against the HIV-1 envelope glycoprotein can completely block HIV-1/SIV chimeric virus infections of macaque monkeys. Nat Med, 1999. 5(2): p. 204-10.
[0262] 66. Mascola, J. R., et al., Protection of macaques against vaginal transmission of a pathogenic HIV-1/SIV chimeric virus by passive infusion of neutralizing antibodies. Nat Med, 2000. 6(2): p. 207-10.
[0263] 67. Poignard, P., et al., Neutralizing antibodies have limited effects on the control of established HIV-1 infection in vivo. Immunity, 1999. 10(4): p. 431-8.
[0264] 68. Nathanson, N. and B. J. Mathieson, Biological considerations in the development of a human immunodeficiency virus vaccine. J Infect Dis, 2000. 182(2): p. 579-89.
[0265] 69. Fast, P. E. and M. C. Walker, Human trials of experimental AIDS vaccines. Aids, 1993. 7(Suppl 1): p. S147-59.
[0266] 70. Graham, B. S., et al., Analysis of intercurrent human immunodeficiency virus type 1 infections in phase I and II trials of candidate AIDS vaccines. AIDS Vaccine Evaluation Group, and the Correlates of HIV Immune Protection Group. J Infect Dis, 1998. 177(2): p. 310-9.
[0267] 71. Connor, R. I., et al., Immunological and virological analyses of persons infected by human immunodeficiency virus type 1 while participating in trials of recombinant gp120 subunit vaccines. J Virol, 1998. 72(2): p. 1552-76.
[0268] 72. Johnson, R. P., Macaque models for AIDS vaccine development. Curr Opin Immunol, 1996. 8(4): p. 554-60.
[0269] 73. Reimann, K. A., et al., A chimeric simian/human immunodeficiency virus expressing a primary patient human immunodeficiency virus type 1 isolate env causes an AIDS-like disease after in vivo passage in rhesus monkeys. J Virol, 1996. 70(10): p. 6922-8.
[0270] 74. Feinberg, M. B. and J. P. Moore, AIDS vaccine models: Challenging challenge viruses. Nat Med, 2002. 8(3): p. 207-10.
[0271] 75. Horton, H., et al., Immunization of rhesus macaques with a DNA prime/modified vaccinia virus Ankara boost regimen induces broad simian immunodeficiency virus (SIV)-specific T-cell responses and reduces initial viral replication but does not prevent disease progression following challenge with pathogenic SIVmac239. J Virol, 2002. 76(14): p. 7187-202.
[0272] 76. Barouch, D. H., et al., Eventual AIDS vaccine failure in a rhesus monkey by viral escape from cytotoxic T lymphocytes. Nature, 2002. 415(6869): p. 335-9.
[0273] 77. Gaschen, B., et al., Diversity considerations in HIV-1 vaccine selection. Science, 2002. 296(5577): p. 2354-60.
[0274] 78. Daniel, M. D., et al., Protective effects of a live attenuated SIV vaccine with a deletion in the nef gene. Science, 1992. 258(5090): p. 1938-41.
[0275] 79. Johnson, R. P., et al., Highly attenuated vaccine strains of simian immunodeficiency virus protect against vaginal challenge: inverse relationship of degree of protection with level of attenuation. J Virol, 1999. 73(6): p. 4952-61.
[0276] 80. Titti, F., et al., Live attenuated simian immunodeficiency virus prevents super-infection by cloned SIVmac251 in cynomolgus monkeys. J Gen Virol, 1997. 78(Pt 10): p. 2529-39.
[0277] 81. Khatissian, E., et al., Persistence of pathogenic challenge virus in macaques protected by simian immunodeficiency virus SIVmacDeltanef. J Virol, 2001. 75(3): p. 1507-15.
[0278] 82. Cranage, M. P., et al., In vivo resistance to simian immunodeficiency virus superinfection depends on attenuated virus dose. J Gen Virol, 1998. 79(Pt 8): p. 1935-44.
[0279] 83. Baba, T. W., et al., Live attenuated, multiply deleted simian immunodeficiency virus causes AIDS in infant and adult macaques. Nat Med, 1999. 5(2): p. 194-203.
[0280] 84. Gauduin, M. C., et al., Characterization of SIV-specific CD4+ T-helper proliferative responses in macaques immunized with live-attenuated SIV. J Med Primatol, 1999. 28(4-5): p. 233-41.
[0281] 85. Johnson, R. P., et al., Induction of vigorous cytotoxic T-lymphocyte responses by live attenuated simian immunodeficiency virus. J Virol, 1997. 71(10): p. 7711-8.
[0282] 86. Corbin, A. and M. Sitbon, Protection against retroviral diseases after vaccination is conferred by interference to superinfection with attenuated murine leukemia viruses. J Virol, 1993. 67(9): p. 5146-52.
[0283] 87. Stebbings, R., et al., Mechanisms of protection induced by attenuated simian immunodeficiency virus. II. Lymphocyte depletion does not abrogate protection. AIDS Res Hum Retroviruses, 1998. 14(13): p. 1187-98.
[0284] 88. Stebbings, R. J., et al., Mechanisms of protection induced by attenuated simian immunodeficiency virus. Virology, 2002. 296(2): p. 338-53.
[0285] 89. Nixon, D. F., et al., Simian immunodeficiency virus-specific cytotoxic T lymphocytes and protection against challenge in rhesus macaques immunized with a live attenuated simian immunodeficiency virus vaccine. Virology, 2000. 266(1): p. 203-10.
[0286] 90. Mocarski, J., E. S, and C. T. Courcelle, Cytomegaloviruses and their replication, in Fields Virology, D. M. Knipe and P. M. Howley, Editors. 2001, Lippincott Williams & Wilkins: Philadelphia. p. 2629-2674.
[0287] 91. Pass, R. F., Cytomegalovirus, in Fields Virology, D. M. Knipe and P. M. Howley, Editors. 2001, Lippincott Williams & Wilkins: Philadelphia. p. 2675-2706.
[0288] 92. Vogel, P., et al., Seroepidemiologic studies of cytomegalovirus infection in a breeding population of rhesus macaques. Lab Anim Sci, 1994. 44(1): p. 25-30.
[0289] 93. Ho, M., Epidemiology of cytomegalovirus infections. Rev Infect Dis, 1990. 12 Suppl 7: p. S701-10.
[0290] 94. Zanghellini, F., et al., Asymptomatic primary cytomegalovirus infection: virologic and immunologic features. J Infect Dis, 1999. 180(3): p. 702-7.
[0291] 95. Lockridge, K. M., et al., Pathogenesis of experimental rhesus cytomegalovirus infection. J Virol, 1999. 73(11): p. 9576-83.
[0292] 96. Pass, R. F., et al., Excretion of cytomegalovirus in mothers: observations after delivery of congenitally infected and normal infants. J Infect Dis, 1982. 146(1): p. 1-6.
[0293] 97. Huff, J., et al., Development and application of a real-time PCR assay for detection of B virus and Rhesus Cytomegalovirus in Rhesus Macaques. J. Gen. Virol., 2002. 84(in press).
[0294] 98. Soderberg-Naucler, C. and J. Y. Nelson, Human cytomegalovirus latency and reactivation-a delicate balance between the virus and its host's immune system. Intervirology, 1999. 42(5-6): p. 314-21.
[0295] 99. Reinke, P., et al., Mechanisms of human cytomegalovirus (HCMV) (re)activation and its impact on organ transplant patients. Transpl Infect Dis, 1999. 1(3): p. 157-64.
[0296] 100. Mocarski, E. S., Jr., Immunomodulation by cytomegaloviruses: manipulative strategies beyond evasion. Trends Microbiol, 2002. 10(7): p. 332-9.
[0297] 101. Atalay, R., et al., Identification and expression of human cytomegalovirus transcription units coding for two distinct Fcgamma receptor homologs. J Virol, 2002. 76(17): p. 8596-608.
[0298] 102. Penfold, M. E., et al., Cytomegalovirus encodes a potent alpha chemokine. Proc Natl Acad Sci USA, 1999. 96(17): p. 9839-44.
[0299] 103. Skaletskaya, A., et al., A cytomegalovirus-encoded inhibitor of apoptosis that suppresses caspase-8 activation. Proc Natl Acad Sci USA, 2001. 98(14): p. 7829-34.
[0300] 104. Benedict, C. A., et al., Cutting edge: a novel viral TNF receptor superfamily member in virulent strains of human cytomegalovirus. J Immunol, 1999. 162(12): p. 6967-70.
[0301] 105. Spencer, J. V., et al., Potent immunosuppressive activities of cytomegalovirus-encoded interleukin-10. J Virol, 2002. 76(3): p. 1285-92.
[0302] 106. Boppana, S. B., et al., Intrauterine transmission of cytomegalovirus to infants of women with preconceptional immunity. N Engl J Med, 2001. 344(18): p. 1366-71.
[0303] 107. Plotkin, S. A., et al., Protective effects of Towne cytomegalovirus vaccine against low-passage cytomegalovirus administered as a challenge. J Infect Dis, 1989. 159(5): p. 860-5.
[0304] 108. Waldrop, S. L., et al., Determination of antigen-specific memory/effector CD4+ T cell frequencies by flow cytometry: evidence for a novel, antigen-specific homeostatic mechanism in HIV-associated immunodeficiency. J Clin Invest, 1997. 99(7): p. 1739-50.
[0305] 109. Waldrop, S. L., et al., Normal human CD4+ memory T cells display broad heterogeneity in their activation threshold for cytokine synthesis. J Immunol, 1998. 161(10): p. 5284-95.
[0306] 110. Asanuma, H., et al., Frequencies of memory T cells specific for varicella-zoster virus, herpes simplex virus, and cytomegalovirus by intracellular detection of cytokine expression. J Infect Dis, 2000. 181(3): p. 859-66.
[0307] 111. Komanduri, K. V., et al., Direct measurement of CD4+ and CD8+ T-cell responses to CMV in HIV-1-infected subjects. Virology, 2001. 279(2): p. 459-70.
[0308] 112. Komanduri, K. V., et al., Restoration of cytomegalovirus-specific CD4+ T-lymphocyte responses after ganciclovir and highly active antiretroviral therapy in individuals infected with HIV-1. Nat Med, 1998. 4(8): p. 953-6.
[0309] 113. Sester, M., et al., Sustained high frequencies of specific CD4 T cells restricted to a single persistent virus. J Virol, 2002. 76(8): p. 3748-55.
[0310] 114. Sester, M., et al., Age-related decrease in adenovirus-specific T cell responses. J Infect Dis, 2002. 185(10): p. 1379-87.
[0311] 115. Gillespie G. M., et al., Functional heterogeneity and high frequencies of cytomegalovirus-specific CD8(+) T lymphocytes in healthy seropositive donors. J Virol, 2000. 74(17): p. 8140-50.
[0312] 116. Kern, F., et al., Target structures of the CD8(+)-T-cell response to human cytomegalovirus: the 72-kilodalton major immediate-early protein revisited. J Virol, 1999. 73(10): p. 8179-84.
[0313] 117. Kern, F., et al., Cytomegalovirus (CMV) phosphoprotein 65 makes a large contribution to shaping the T cell repertoire in CMV-exposed individuals. J Infect Dis, 2002. 185(12): p. 1709-16.
[0314] 118. Khan, N., et al., Cytomegalovirus seropositivity drives the CD8 T cell repertoire toward greater clonality in healthy elderly individuals. J Immunol, 2002. 169(4): p. 1984-92.
[0315] 119. Jarvis, M. A. and J. A. Nelson, Human cytomegalovirus persistence and latency in endothelial cells and macrophages. Curr Opin Microbiol, 2002. 5(4): p. 403-7.
[0316] 120. Alford, C. A., K. Hayes, and W. Britt, Primary cytomegalovirus infection in pregnancy: comparison of antibody responses to virus-encodedproteins between women with and without intrauterine infection. J Infect Dis, 1988. 158(5): p. 917-24.
[0317] 121. Hayes, K., C. Alford, and W. Britt, Antibody response to virus-encodedproteins after cytomegalovirus mononucleosis. J Infect Dis, 1987. 156(4): p. 615-21.
[0318] 122. Zaia, J. A., et al., Polypeptide-specific antibody response to human cytomegalovirus after infection in bone marrow transplant recipients. J Infect Dis, 1986. 153(4): p. 780-7.
[0319] 123. Rasmussen, L., et al., Virus-specific IgG and IgM antibodies in normal and immunocompromised subjects infected with cytomegalovirus. J Infect Dis, 1982. 145(2): p. 191-9.
[0320] 124. Britt, W. J. and C. A. Alford, Cytomegalovirus, in Fields Virology, B. N. Fields, D. M. Knipe, and P. M. Howley, Editors. 1996, Raven Press: New York.
[0321] 125. Letvin, N. L., Progress in the development of an HIV-1 vaccine. Science, 1998. 280(5371): p. 1875-80.
[0322] 126. Swanson, R., E. Bergquam, and S. W. Wong, Characterization of rhesus cytomegalovirus genes associated with anti-viral susceptibility. Virology, 1998. 240(2): p. 338-48.
[0323] 127. Lockridge, K. M., et al., Primate cytomegaloviruses encode and express an IL-10-like protein. Virology, 2000. 268(2): p. 272-80.
[0324] 128. Kuhn, E. M., et al., Immunohistochemical studies of productive rhesus cytomegalovirus infection in rhesus monkeys (Macaca mulatta) infected with simian immunodeficiency virus. Vet Pathol, 1999. 36(1): p. 51-6.
[0325] 129. Kaur, A., et al., Decreased frequency of cytomegalovirus (CMV)-specific CD4+ T lymphocytes in simian immunodeficiency virus-infected rhesus macaques: Inverse relationship with CMV viremia. J Virol, 2002. 76(8): p. 3646-58.
[0326] 130. Sequar, G., et al., Experimental coinfection of rhesus macaques with rhesus cytomegalovirus and simian immunodeficiency virus: pathogenesis. J Virol, 2002. 76(15): p. 7661-71.
[0327] 131. Tarantal, A. F., et al., Neuropathogenesis induced by rhesus cytomegalovirus in fetal rhesus monkeys (Macaca mulatta). J Infect Dis, 1998. 177(2): p. 446-50.
[0328] 132. Kravitz, R. H., et al., Cloning and characterization of rhesus cytomegalovirus glycoprotein B. J Gen Virol, 1997. 78(Pt 8): p. 2009-13.
[0329] 133. Barry, P. A., et al., Nucleotide sequence and molecular analysis of the rhesus cytomegalovirus immediate-early gene and the UL121-117 open reading frames. Virology, 1996. 215(1): p. 61-72.
[0330] 134. Connor, R. I., et al. Temporal analyses of virus replication, immune responses, and efficacy in rhesus macaque immunized with a live, attenuated simian immunodeficiency virus vaccine. J Virol, 1998. 72(9): p. 7501-9.

The application's sequence listing, which the Patent Office published only in electronic form, follows.

SEQUENCE LISTING (36 sequences)

SEQ ID NO: 1 - DNA, 221454 bp, Rhesus cytomegalovirus
cgggggggtgtttgtggcgggggggtaaaatttggccagctgccaagtaagagcagacggagacggggtccagcacagcagacagacacggggcactgggaaagcacagaacaacacacggagaggacacacagagacccgcacagaggcgacaccgttcacacacacacacagcagcagggccgcagtgacaccgcggcaaacagagagaggcagacggacaacgaagaacgccgaagcagtagaagagaagggcgagggctatccgcggccccggcgacccccttccccagtcgccgtcgtgccgaggccgcggaggacggctgcccggggttggcggtctgccaagaacacgcggcccttccccctccctccacgcgagccgcgcacggtgaaacacacacaggcagacaccaccgccgtccccctgtcggcccgttccgggaggctggaggggggcccgggggtcgcggcggggggcgtcaaaacacgcgccgtctctgcggggcaggacgccggcagcctggcgctgtttgctcgcgctcgctttttctcccccgcgccgcgaaacccgagccgcccggctgactcagcgctcgcggccacaccgtctacaccgccggcgcccggcgcacgctgaaataaaaaccggttccttcagctcgcttcactgctcctgcgctgagtcaacaccaacgcgccccgccaaaggcagcactgagagacgggcagaaagggacttcccccggcccgcgtgtggcgctcgctgcgccgcctagcgtcaggccaccctcgcctgcctgcgcgccgcctactatcaactatccgcgacgttcgcccattatcaactgcacaccctcgccatgccgccactcaatccacaatccgcactcacacactcctcatttcactaccaactctccgctcccttgaccccacactctcccgcttacaccaacctcccacattctgcacccaaccctctccacaacacactcctcgcccgtctcagcgcacctcctccaccccatcacgcactatgcttctcctcatccctccctccttcgcgtttcccctacactccctccagcactcccaaccacgcactcttaaaccctccagccttctccgcgtcgcgctcactctcgcatcacccaccaacatgtcacacactcccggcgcctgcgccaacacctcctcgcctttctcgctctcacccttaacccgctggcgcgcctgcaccatcttcctacccgcacagcgctgtccaacctgcggcgactggagcaccgccgaacacgaatccggcacctgccgagctccagatgccgacctcactgactactcaggtggatccacctccgatgacgaggccgtgactgcctacgcccacgccctgcgcagcatgcccaccaacccatcctacgccaaacacctccgctcctactccgcacgctctcgctcttcacgcgcacgccatcgccaatgccgccgccaacccccctccgccgccacccactcacctgccccccgtcaccctactccctccctctcctcatctacctccgccacacctccacctcctgcactcacctgtcccctcactcaccttcgcacacctccacgcaaccccccacccccagacacacgccaacaacacgatcccctcggcgaccaggccgacgaagcgctccgcatctacggctaccccatcagccgctacgatatgcgcaccggcaccgcagaccgcctcagcccagaccgcggaggccccctggaacccaattgctggtgcctctggggagtgcacgcacacaaaaatcaccgtcctatcattcctttattaacagcgcgcgctcgcgacggccccatcaaaagcggcggctgggatgttctgtacggtcgcggctacggttaccgcgcattcccaggtcccgaaggcgaatctcgccccgtctggacacaacacatcgtcttcctcctcggcggccacggccctcgcctgcagctgaaccgcgcgtgtgcccgagaagctgaagcccgaggactcctaccactttggcctgtccactcacgcacacctcaaacatccaccgactccgacagctccatcgacggcattccacgctccaacctacccagactccttcaaaaacacacagcacaacacacccgcaacggcaccagccgccaggccgaacgagcagaacgaggtgcttggattgtctcagacaccttcaccgcccctggtttacggaatacttggaacacgcgtactcatgaggaattctggcaacgcaactataccaaagactacatggaacacagcgttttcctcccaacttcgccgaaccgcttctacgaccctttccagagccgccgcccttgtcgccattcatccactaccagctctgatactgacagcgacggcgacgacaacgaaaacaccgtacccatcacacctgacagttacatccctcccgatggaacctgcaagcattctccacccgaaactcactctcatacttcttccaccactcccgagacagaaaccactcgcctgtgatcatataaatagcatttattttaataaatacaaatcttgaatcccagtgttatgatctttgtcagttttcttcccccatgccttctcgtacgacacatcctcctcgctatctgcccgccgtcatatacggcagttgtcataattcatccctttctggtcccttctcgcccttcgcatctccaaaatgccagttccaagcttccaacgcgccgtgcctgcgctctgcctcctcctgctgctgagcgctccactgctgcgttggtcgtaccacttcgcccgacgatattgtaccgactgcttcatctcggcgacgcactggctgctgaacgcaagcttctggctcgtacctcgcttgctgttcctgtttgcctacattatggttctctcttggatcactctgctgtgcatattcctcgcactcagatgcataggcgtttttcgtggggcagagatattcgacgagccaacgggccgcgaagctcagtagtatattgctccacttttcccttttcctagtgtagatgtaccgtgtcgcttcccattccatagtgttcacgaacgctcgaccgcacgcacgccaccaaggcgtgtcgaacgcgtccaccaggtcttccatgcgatccagcaattcatcgcgttccacagcgctggaacaaggcacaagtgccatgtttgtccgccttcccgccgagcaacaggtctgtaggctgtcagcactatacaaaggagagcgccgctgcctccaaggaagaggagagcgcacgcactttcctctgcgcgctccgattgcaaaacgaggagtgttaaaacgacaggaatccccggaggctctcattcggcaaagtcaggatcggctcccaagtgtattctccgaggctcgctgggactgtttattataaagcccgtgtacgtcatttttatacatctatatcgaaaccgactgggaaagcccagcgctatcatgtgtccgggacttttcacctacatcacccttacaggaatggtgatgcacacagtgtccgggaatccgcgtcagctcctgtgcaatgtcacccgttttccgggaaacaacgtgtctcaggtgcggctgagcacgggcgacaatgtcacctttctgtacaatgtgtcgcagggccactctctgtcgtggctgtactcgaacctgaccgccaatagcagccgccacctaagaaagtacaccttgtgcagtgttacttctaactacagaatgaccgagacccgcaacaacatgtgcctgcactgtaaccgctcgagcctgacgctatgctcggcgagaccccaggactcggggctgtatgtgttacgcgatgacaccaataacactgatgtgatgcgatgtaatgcgactgtgaccggcaacggacagctgcctgtcacgcacagaccgcacagcaggcctacggtgaccaggatcagcagcgcgcacttgtcgggtatcactctaggtaatcagaaacattcccccaccacctggaacacgtggatggtccacatttcgttcgccaccatggccctggcgtgctttggggtagcggtggttttgtccggctgcgtgtgcctacggtccgtgcgcgcctggactcagaagtatcggccgctgaatgaggaccctgcgcctcagaaaatcgattttccggacgggacgatgaaagaacaccctcatgtgactgttatcgaacctacgaaaagtgcagatggcacggttgtgggtttatcggcggtgagcgatgataaacccgccacactgtggctgtcgaggtaaagatgcaaagtgaatgtgtgtatgtttccaggaaatgactgccgttttccaagaaataaaggcgatatgaaacgatgtcagtactcgctggcgtgttgtgttttctatcatcagtcatgagaatcagaatgcgtatacatgggagctaagtgcgagacgtttatttgagatatggtgagcctgtctcagattgtctacctgactgtaatagcggctgatgatttagaaactgatctgttaccactgacttttttgcttcttcgcaagtggttgctgacattatgtaaacgttgccgttctgccacaatactaacgaaaaaacgcggatacaaaaaacagtaaacgattattcggattgtcatggtaataaccattattgtcctttatttattattagtgaaaccctctaattcaagtacaaacacacatacatatgcagtaccaatcggaggtaatgtcactttgtcagactttaccaacgacataacacattatacattaggtatatggtactttacaagttcttcaggaatgtgccaaatagatatcagtgataacgataggcatcgcaaattgtgcaatatctattatgcacggacagaatgtgaaactctaacattacggagcgcatgcaaactagcgatacaacactcatgtaatatgacaacattgaccatttacaatgtaaaagattatacacctaaagattatacattgaaaaagcgccataaaaattctacggaaactacacaatactataggattcaacttgtattcccaaccacacaaataccaaaaaccaatactgttgtctacccccccccccaccagagaacccaggtgctttaacttccgacaattcatcttatacaacaaccatcgttgtgaccggtgtactagcgatgcttttcgccatgattgtgttactgtattgttgcctaaacaaatctcgagatcaacatcaacattagtataatgcgctgttctagctatgtgttgtacagtattacctttctgttccgtgaaatgtgttatacaaaacacattatatacaattactcaacggttgcaggcggtacagtaacattttttgatgtcactggatacagtggatttactaaaggtacatggtattttcaacctgttaatgatagttgtttcaacacatttgtgacaaatgatgcatttacgaaactgtgtggcgtctactaccaaataaattacacagatctatctaccataatagaatcctgccaaacgtacttcaatcacacatgcaacctcacgtctttaagtctgcacaacattaccccacaggcaccaactacatataagctagtaaaaaacgctgtcactcgcaaacaaaacattacattttataatttgcagattatatcaatagagaatgtactcccttctcaagctaattatgcatcacgaggttcactttataacacaccgataattgctactgtgatactgataattgtcattaccgtcatagtgtatatgcaatatcaccacaaagatcatgaacgcataccatacactcattagctgcctctgcttcttcatactgtatgcatatattacagaatctacaagggttgtaactttacaatatgtttataatgtatctattggcgaaaatgttacattatctaaacccgataacctatccttccaactacattcctggttctgtaacaacagagctagtgcatgtaataatccaataatgaagttatgcgaagaaactgcgggtaataataaaccgaacagttatactagatttcaaaataactgccatccgccgacatttacgtgcaacactacaggattgtatctgtataatgtacaagaaaccgatccaaccacttatacactaacacaacgcgccggtaacggcaatataacagatagaaacacgacttacattatacattttatcactagcaccacccccccccccgttacaaaactacatatgcaatttatcttcaaccagttgcacaaacacaagcaactaccaactatagctacataactatcacattaactgttataacacttatactattcatgttaggagccggatatctaaagcatcggagatcattaaagcattataaacaaaatacacataaatgtacatcattaggtgaaagcagatatcccgaaagctccatataagatgctatacacaaatatgttaccagcaatgcagtatgtttttccatatacaaacattaatatacatgctacttagttatgtaatttgccaaaaggaaattaacattactgttgttagtggaaacaatgtaacattagtgaaacccgacaatgcttcttttcaactggaacaatggttttttcaatcccgccttaacgatatttgtccgaacacacaactatgtaaccagtttccgaaagacattcgtacgtatgaaccaaaaccaccatattgtatgccactcacatttatgtgcaatcgtacaggcttatacttacaaaacgtgcgcacaactgtcccggtgacatatttcttgatacaacaaggcggtttgtcagaattaccatataggaacataacatacaacatacttttttccaccaccccccccccacttatcaagcataacaccttataattctcaacaacattctgtatctctgacatctatatctcaaccgtatgctaacaaccacatttacattgtaatcgtgtttgttgtaacaatgttttgtataggattaggatatctacattatcgtaagccattacaaaagcgttttcaacgattgtaaacagtccgctataaaaaaccatacatccccaattttatcgttagatctctctgtagcgtcttttgatgttattaatctagctccttatccaattatatattgaaaaatgtcatcaagtacaacaaatccaacatcaccgagtgtgaactccgtacttcttggcactgcaccagatgttgacgcaatctatatactaattgtaattctagctatcctatcaatcattctggaaattcaatgcattattcatttttattgctacacaagggcgtctctgctactgttcaaagcacgtgcataaacaaaagcaagaaatgacatccactttcccataaaaaccaagctcagaaactccacgcgatcacaagatgcccgggacaagcatagtagttttcatatccctgggcgtcatcggcggactttctctgataatctttggatccttctgcctttggaaactgtacgacagaatgcttcaatacttttacaaatacaaaagactgaaccccatggaggctactgccatagaacagtgactttttaaacattgttcgagctgcgacataccaatatgctcgcaactctttttatctttgtgtgtttgttcactgcgcatctgttaatgaattttgcatgtgaatgccttgacagattttgcgagaagttgcttgaacgatatgaacagtacgaaagaattgtgtgagtgacattgtattaccactgcaatgtgagacgccgtgagcgttataatggaagcaaaagctaccgaaaacaaccgttgaaagcatttatcgagtattgtgcaatatcaccaaacgaacatggcgaacttcaccatcgtcattgtggtgttctgcttcatgttcagtttggtatttgggctgctacttatcattttgagcattatctgctgcatctgctaccgattaaaaagatgggccagcgcagtcagtgccgccctcgctgtgaagcagcaacaatcccgtatgattatcatttgatacccatacgcgttacgcaccaatatcccccacccactaccgctatatcaacacgctgttaaagattgagtttccagtatgagccatccgagaatcgcaattctcgggattctcacaatgggcaacgaggtcgtgttcgctgttatcgctgtggtggcctcgtttgtcgcccttatcatgggcattctactggatctcctgtacctgcatgcatatcagaaattttgcaactattactgctgctgcccctttcagagactgtcgatatacgatgcagaggtcttggaagagctcgaagtgtaaaaggctgactatggaaacaaccaacaaaaaagacacacgggagttcgattgttttgtgatcataactcagcatgctctctttttattacaaccccgggatcgacatgctgttgcaccgagggtgaggaggatgaagaagaggaaggagatggtggtgatgatgaggacgaagacgacgagccgttgcgcgccttgaggagctccttattgggaactcggaacgcggccaacggacaccctttgacgttgctacagactagagactggatagttgcactcttgacgatcccaaaccccacgtctccgccgaaggtgctgggtttccagtaacccggggagcagatgacgttcgccatgaggcctttgagggaaaacggagcccccagctcgagaatgctctcaccgaagatggcgttgggacggggcttttccaccaagaatccggtgtacaactccacagcctcgatgtctccgtaaagggccctgagttcggcagcgatttccttttctcctgttttattaataaaaataaaatgccacggacacataatcaacacattttgcattcatattgtatggacaaaaaaaataaaaaagactgttgaaaatgtaatagctgtcacctgtaagttcttcgaacgactcgtagggctttaaactgaaccgctttcggtactggttgagggattgaaacctcatttcacggccatgttctatggccgcccgggagacccttctgagggcggggggtacgttcctgccgccggagatctaggaggggagaagggtggatagtgacagacgattaatttgttacaaaaactacgtggacagagatgattgacagatttaacggcgcacttactcggccagctatttgtttcgtgaacgattctactagctgggtaatgccgtgggtcatgagtatggaattgttgtaaacgaagttaatgtagtcatactttgttttatcaatctcaaacgcatccggcatgagagaatgccagtgatacaacatgttaaactcggaaaatatacgattttggtactggaacgaagtaccaaagagcagttcgggcttaaacagcaactgaaagtggtagccgctgagctgctgaacatactgcgtcacgataatgttgattgtttccccgataatgatgagtcgagtggtctgaaacagttgttcgtcactccattctggatgttctcgtttcagaacatcgcacactctgttgtgttccctgagccagatagtagcgtacatcatgagaccaggcaccaggccaaaagcctcttgaccgacagccagacgcatattttcgggcacttcgggaggatagatcatgtgcacctggacatctttgaccgaggggggatacatttcaccgtcaataatctgatacttatctttcgcgtctctgaagagacgcaactttgactgtttttctggcgtctctccatagatgtggttgagatccacctagggatatagagacgggaaccgttagaacgagtatcatgacgttgtgaagcagatggataatttgacaggacacacattgttcttaccccatgtcccagtcctttagtgaaggccgggcctcgcgccaaatcagtcctaaaaaactggtgcgtgaaatgttggccaaaaaaggcaaacattaagttggtgccctggggatcgggagtgaaggtcctccgaagaagagttttttccacaacgtgtgccgcatccggcagattttttttacctggtgaacgagaacaattagccaccgtgccagcgatgacaacgatcgcatggcgggcacaccgaggaaagtcacctttgaccccaagaggagttggacaatcgtgaggaaccggaggtagaatccttgcgtaataggagagattggagaaagcttcccagcttgggtattcgtagtccgcgttgtagatgggagggctgtcaatcaaatcggatctacctgaacaagcaaaagtggcataaagcaaaaattagaatgactgaaaggcaagggtagcgtaactcatctaacccgtcgggataacattacttactggtcagtatgtaccgcattaccgcgtggcggaggaaaggaatattgttgaccagccaccatatcgttgagaagtgagtcaacgtgtaatacacggtgtctggatctggcttcaggaaaagtttaatgcgagtgaataactcggctgtaaaaagagaatgaggggaacgccatgataacaatatctaaatgtgtaacctagtaataaacgttatcacattctacaatcttacgagtcgtgcagtcatggtcgtagaaacccgtgtgtgtgcaatcgcatttgtaatgatggaaccccacggtcatgcagatgcctctttttgacacggatgggagcaacaagggttggctacgatgcgaagagagagaataagagacaatcagtacgatgatgtttttactcatagccagaatgtagtgtcttttaatacgtaccggcatgatttagaaaagtacaataagagataaaggagaataagagaaagattctgcgcatactagcaccaccaccaaggacccagtcgtctacgactgaaggcaccaatattcgtggtattatatatcggcttcaataaaataaaacacgccaattgtttgttaatagctttattttgtaaattgcttagtcaacattcattccggaaaaagaattgatataaacacttgactccgagccacaagatgaggcgagataagcatgcatttttacataacattcattattttgacgttcagtccctgtggcgagagcgtttctcttctgatcaagaaccacactgtaacatgggatagttctgtcattctgaaagacgtggataacaatacaatgaataacttgggtgaatgggcagcgtatcttgtcaatacgacagtgtgtcccaacacaaatgtgacattgtgtatgattaatccgcatctcttaccaaataagacggataaccgaacaaacactacacgcatatcacaatgcttaaacatgacaacgtttatttgtaacacaactttacagattacgaacattacaaacgaaacccatacagactacatgttgacaagatatcgcaattgcacaaacggagaccatagcaatgagaacactgagcccgagtatacacagtttcatttagaattcacaatgacaacgttaccgcccacaactgttcttctaacaacaaccatggaaactactaccagtgaatacactgcgacatcaacaccattagctttagaactaagtgaaagcttttacatggcttcaatcggtattcccgccatgatatttgtgggaggagggttgctttttggactttgttattatgcctacatacaaggatggtgttcctgccgtacaagaacgacgtcctcagcgcacacagaacgtttgctatcataaaccgccgtacacggcggtttccagaccgcaataaccgctctgtgctcgagaaatatgggaggagttagcgagcaaaagctcattttgtgtaccactgagcattagaagcggatcacggaacgccgttgtgccttggcgtgctggacgattgtcaagacggtgaatgttacgaaaagcggacagaaaaacagtgccatgactaagtatacgtgcttcagatcgatgtctgcctgcggcatttttatgctgctgataaatttggcattagcgtgtgactcccaatgtgcctgtaatagtagctgtgggtttgcatacaacgttacccacgtatccggctacgaacacagcaacgtaacattgcatacaagcatcagtcacagtaacatatcgcatatgaatgtcggttactggatacgttacaactatccggtaaattcgtatacaatatgtaccgtttcgggcaacaatgttgctagcaccaagcataatggctgatttttcgagtgcaacggcaccagtctgacgttgcacaacttgaatgccgatcacacgggaagctatctttttaagaatcttctaggactgatggagcactataccgtcaccgtgctacctattccacagccgccggcccctcaggtgactaccgtgaccaattgctcacttacctttttcagcgaacacctctggcgaaacgcaactacgagaataataaccacaacaacacaaagtacctcaacaactaccactagaaccacaaaacccacaacgacaacgcaccgaacgaccgccggtcgagtcagcacccccacgcccgaggaaagttccacctcgacaactaccgaagaaagtactactaccacatggccacccggacgaccaaagtttatttccaagtactctaaactctcggtgtatgcagcgtggacggccgggctcttcggtacggccctattcatctttctcgtggtgtttgtgtgtgcgctcaggcaccttaataacagacaaggcgccctctaccgaccgccaccaggtcttcctgaaaaagacaaggaaaagaagaagacaaaaaccacgcggtctggcgtgtaccatctgctcccttcggagaaaaaaaagtcctcaatcaacatcttgcgctgtgaagtcaatgttttcctagagtagctactcggtcccacccggcattcgaacgtgcgcgcggatcgacaagctaccctgagaagccattgcgagtttttagacgacgagccacataataatccagaccaacataatccagatgacaatccccagcagtacacgcagaaaaacgatcgcgtcccaaacggtaacggtgccaagtggaggcggcggtgtcgtgggaatgacgagcgaaacggcgtccatcgtaccgcgattgtttcactgaaaaaaaaatgaaaagtgaaactcagcgttcgcggtgcaaatacggtcattatatctgtcacaaataacggaaacattcggaccgaagacaatggcaacatggattcaatgttgtatctcagaagcataaaaccgacttcaggtaaaaaactcacacaagctcgtgcaaaacgttgctagaagcacagaccgctatgaagaagcacgtttccaggcttatgtgctcctatttcgtcatgttttggccgattctggcaacggacaactcgacaaatagttcatcgagtgttaatatgacgactgaattaactacgctctcaacaacacccagatcgacaaatagttcatatatcaacagcacaacatggacaacgacgtatggatcggcaagtacttcgcaagggaacactacgacccctatgtcaaggacggttacgagcatctcatatacgtcacaaaatgcatcttgtacttcagatgtaactctaacatcatatacaaatacgttatcaaatgaatcaacgaatgtatcaagaaataattcgtatacaacaacaacaacctcttggacaagtacgccagaaatgaacataaccacaccgcccccatggccttttgaaatgcatggtcattatttcacactatgggtgaataattgttattgtggatatctgaaggtcctccctggaagcaatataaccttcaatggaacaaaaaagaatgacaccgactccatatggtttttagcaagatattttaattattggctttgcatctttactgctgatgcaaattatacaatggattatatcaatttaacacatacatgtacgtcagaaactatgactttatggaacgtattggaaggcaattcgggaatctatttccaacgaagaacggataatcagaaatatgattctacatatatctgttatatcctaaatgtcacagcagatgctgctaacaccacgtatcctgaaataactaccactaaatgtcaccggccaccatggagaaatcgtcccgatttcgcaagcattgaagctcatccaattacccccgactatgaagaactaagtattcaagatattttggaatcgttaagtcttaagggcggtctaaaaggttccttgcttaaatttgtacttagattcggatggttatgcggcattgtagttggcgtaacggttacgctcattataattttgaaactccctcaaaaactgtgcttcttatccagttatgtaccacaacgtcgaggttacaaaagactgtcatctaatcagattctttaattgtattacatcaaatgtctgcaagtgtatatattgcaatattcaataaatggactctttggatcaaacgcagctgcaaccatgcagatctcaaagttggtttatgcatccatagctgtattctgggctactgcatttatacacggacagacgagcgattcgtcttacaaagcaacaacgactctatgggcaaataggaacagcacatcgcaatcaagcacaatgcaactaacgaccgaaccgacggcaagtggatatcgcaatagttcacatcgaaacggcacaacggcaccaccatggacaactattgcagatgacaacacaaccaccttacctccctggcccatcgaaatacagagcacatacttttcgctatgggttaacggctgttattgtggatctttaagcgctcttccaggagccaacgtgacactgaatagtactaagaagcagaataacaccgagacactatggtttcgattaggaatgtttaccaatttactctgcatcttctactttgacaacgataatgactcaataaaatacgaccatttgacatttacatgcacacaaaacaacatcatactgtggaacgtttcggaaaaatattccggaatttactgtgaacgccaaatgtcgttaaccacatataattctacatacatctgttacaatctaacggtgactgcagacgctaccaatgcaacggatccttcaatagtcacgacgaaatgctaccgcagcagagaacaatactattcagtggaaacttcaactacgagtgatagcgctctcaacattgacgatattctgaactcacgaaggaactttcgggacaatggtcagagaaatctgcttggatctgtacttcagtttggatggttgggtgtgattgtaatcggatcaacaattaccctcgctctagtgtttcgtgtgccacaaaaattctgttatttgttctatgaatggaaacataggtatcgtggctacgaaaagatatctggtcaaattttgtaaacattgacacacagaataaactgtacatgtattttcaataaacattgtattataattatgaaaatactaattatgcttatatttgtaatatgcgactcacaaaccattcacttgcctacatgtagtttgaaaacatgttgtataggtgatgatgtttctttaaactccaatataccaactggatgtaacagaacgacgtggtatcgacataaaaacaatagtggcataatgttatgtagcttttcgggagggggtatgacgtccagttctaaagaacgcattaacagaacttgttcacgtcaatcttttatttttatcaacattcaaatgccatcaacaggaacatactacgtcgtcggaaataattgcactacatcgccacttatgtctacgtgttacaatgtgacagttgaacccaggtctaccactgctatgactgttgccgtgaacccgagcataaatataactgctcaattaccacaacgtcttgcgagtcacttcaacgcaactagttttgaaaatgagactgtaacggtccacggtgcttggggacttgtcattgtcgcgttacttttcctgtgggtggctattgagttccgtttacataaaaaatgttttgcttatttcagaaactatgtaaccacattttaattactatacaatgcaacaatattgtgaataaatatgtataatttcaatacggcaatgatagtatgtacactgattcacaaaacattatcaacatatatcaggtgcaataatgattttggaatttcaaacacttgtactcaatataatgaaacagccactgttggacaaaatgttacattaggtatatgtatcgaaaagtataatcccgtatcgtggcataaaaaaacaaacaataaagcaattattatgtgtcaatattcagattcgacaaactgtaatccacatcacgacatatgttatcattgcttatccaattattctttattacttattgatgttcaaacaaattacaatggtatgtactacttatcgtatctaaaagacaataagtacacagatctgtgctacaatctatcaattaatacgccaacattcaacgtctcacatacacagattaatcgtacaaccgtggaatgtatattcaaatcaaatataaataatgtaaagaataaaaatgcacacactactgtaaacgatgcacgaacaacgaatatcgcgtcgtatacaaatgatctaccaaatatgcaacatgcttggttattgttaccattcgcaataaccattacaattgtattattctgggtctatatgcctaaaaaataccaatctcgactaaatactcatagagaatatacaagactacagtattgatgtttttaatttccgtaagatgatataaagctgcacgtaccacaaaaatgctttatttcagaacacattacttatatttcataaatatacatatgaatataaacaaatgtatattacaagcatatcagttgttacatacgtattcattcaaataaccataaattataaaacaaaagagacatgttccgaatatagtatagcacttaatagtcacagaaaacattgtaacacaacattatcgtatacaggacaaaatgttaccctgggtgtacatataggaccatggactcccgcattttggaacctacaaataaacaacacagaaatatcattgtgtgaatatacacatactgtactgaaatgtaatttacatacaatatgttaccaatgtttatccaattattctctactacttatcaatgttacaaaacaatatagcggaatatattggttatcatacgacatcaataatggtaattacaaatatactgaaatgactttgtgttataatttaactgttcactcacgaaacgcgacatctaacaaactactaacaacgtcagcaacacatacaacgattacaccttatgtaactaccaatttacagcataatgaatccatagtaaatgacacatttcaaacatattacacagcaaacaatcatacaccttggctagccttaccaatattaattgttgttctaattgtactatgctggttcaatatgcctcaacgatacaaatatcaaccatatacatgggcgtcatgtttttacagagtatgtactcagacacattgtcttcaaaaaaaataacttgcataccagttaacagtaccgcaggacgcaacgtaactctcaatccaccaccattcaatcatcatactacgtatgtttactggtatcgacaactcggcaagggaaagaacgaattatgccgatacgttccgaacaaacaagagaggaacgccagaataaagtttcaatgtcttagcaattacagtttactactgattaacgtaacgacatcatacaatggtaactatacagtaaatctagatttaggactaggaacaacgtccactacctgttatacactaacagtaaagacagctacgcaaattgtaaagactacaaccagaaagccaactacaactcgaaaaacaactaccacgatgtcgataaccagcacaaccaccgcgacaaccactacacaaaccacatgcagcactaaaagtcctaatactaatgtacattcagattctgatcctgatatggtagcgctaaatgaaacacgcgaactgcagattcgtgaacacaccaatatacatgcgatatggctgttattacctgtactaatagtaattatttgttttttcactgcaaactcaaaaactaccgaactgtaacactgttttaacagagatgataatgcacatcaatgcactaacaatgaacaaaaaagggtcttttgtatggattatgtggcacattccgcaggtttatatatgttatgtgacaaatactaaatatgaaattaatacaaatggtacgaataccagcttagataccccgacatctgaagcaattacagcatccaaagcgtatatggcagtaccaaatgcacatactgcacatgccgattctaacccgagtggatatcatgtaaaaggacaaaacgacgacgattacgcaaacacaacgacaatcatcatattagtaatattgtttattgtaatcattttactattttttagaattccacaacgatgttgggaagggtaccaaaaaacaagggttaattcaccgtattgaaatcattctatgtatgactaagtaacgttgaaaacactgtttgaacgttgaaaatggaggtaggtcagcctgtcaatcatgatcccaatactgagagaatgtggctggttcggatacattggcataacgtgtctacttgtggtaactcaacttatcgacacattaggtaacaaatgctcaaaaacagaaacaagaactggaaccgtaggtactaacatcactctcgttactaattcaccccctaacaacaaaggattactgtactggtacaaacccaattgtaccagcaatgatagattgtgcgactactcagggtttactggtaccaatgctgtgtcaaacagaacgaagttgaaatttacttgcatgaataattcaacgaaactaactctcattaacgttacggctcactattctggtcaatattgtagtagaaccattacatcgaatggaagcgtcgatatctgctttaatgtaactatacatctgcatataaccccagctccatctcctctacctgttccttttcaaacaataccaggatggaatcaccgcaccaccgtccttcaggtacaaataccttcaagtggccagccaggtagttatgaaagtcagcaacaagacgcggcacacattgctagtattttgatattacttctactatttatcgccatcataatcttgttttttttgaagatccctcaaaaactatgggacaaataccacaaaagtaaacatgcaccatctgcctaacaaaacacatttcgcacatataatgtggaaaacacttctaacattaatatctttaatatatgttaatctggcagccgaatgtaaatcaaccacccattatagagaaaaagaagatgattgtgctttatttaaagtaaaactaccagattcgggactttcccactattggtatcgcccaaactgtacgacccgagacatgttgtgttacaaaacagctactggacaaggtgatcttaaagcacacaatccagatttaccgtttacatgtctcgacaatcatactgaactgctatggtgtaatatatggcgaaatcattccggaatatactgccatagtgtttttacatcaacaaacaatggaataaatagagttgatacatgttttaacttaacagttgttcccaaaataaccacaacaaaaaaagcaaccacaacaaagacgacaaccacaactacgctagcatcaaaattgaagactcgcagcacaccagtgataaaaaacccacatatagatggtacacccccaccgtcacatgaaaaaccatcacttaaaaaaccatcattaaaagatacattgcaagcacatacaaccctaactactttactacaatcatatccacccttaactaccacaccaggttacgaagtagtgcagcatactccagaaaaacaggtacaaaatgtcacacacctcgcaactattgtggtcctcatagttgtgtttgttggcatagtcactcttttcatattcaaaattccacaaaaactatggggaaagtatcgtaaagctaaaacacatgcacattttttggaacgggactatgattactagaatataggaaagtccaatagcaagcgtacacgaaacgattatctatcacgtaatcgtttctcttcgttactaatatcacctgtaccagccgtgtaatgaatagtacaggtgaagtttaaagcgcaccataaattacaaattccaatgactctcacatggacacgtcttatattattatcgaatcaattacagatgatttggactttagaatgtacgataactaaagttgtcacaacacaatctggtgctaatgtgcgacttggagactcatcgcgccaaggaaacattgtttggcacaggccaccatgtggtaacgaacaagacgtgttatgtaacaaaacatcaagaagcgaggaaatgttttttattaacagatctatttcatttatgtgcgaacagaagtccaacatgttgaatctacgtagattaacgcccggtaattcagggcaatactgtaagacaatatccactacaaggaatggtaaaaaagagagttatcgagaatgctataatttaacggtcatatctaccaccaaatcaacaccaacaattatgacaacacaacaggaaacatcctcacatagaacatcaaatgtaacaacaccttcaagatttctaggaagaaccgtcaataacaaacgagatagatacgatgatctcgcacctgcattggaacttgtaggctttctattttttatcactattgttgtattattttgcttgcgaacagagctattcgagggtatgtaacatgacaatatacatacaaaaatacctaattcaatggatcatagccatatcattagttcatacgcgcattcaaattgcacatccatgtaaaattacatctctcattaatgtaacagcttacgaaactgtagttttgaacgccactctagcactggacaaatgcttcataatgtggtacaaaagcccaacagaaggaatgtgccaatacaatgcatcacatgcgatgaaagcaagtagctacaatggtaaactaaattacacctgtacattttatacattaaccatactcaatgcaaactcatcggccacagggatgtattatacgcttggtgcacctaacgatgaatgtgttcgagaaaaaatatgttataaagtacaggtacagtttacagtacaacatgaagcacctattgccacacaaattagcccattaatccagaatgaaccctcaatgtctgaatccaccataatatggtatgtatttttagcttcggggctactcataatcatgttttatctagctaaaaatgctcattcatactggaaacatggacattaccacgtgccccaaatatggtggatacaggtggaggaacctcagctataccgttccatggtttcctagagctttccagttgactgtttgactacatcggtttttaaaccgaagaaaacatggagaaaactgaccaccaataattatgtttacacggcgttaccgtaccacacacaacttttggcaacttgtgtttatctcaatcctggcatttattatacacttacattattcgacatctccaagtatacctgttaatgtaaggacgggagacaatattactttaaatgccaccttaaacctaacaaatggtattggatactggtatcataacgacagtatactttgtggatgtactcccaacaacgcggaatccgcttcacgtccactgttgaaatttatatgtcatcggaattgcacaatcactcttctgaacgtgagcagccacagtgctggagactactgcctaatggctaaacccaaaaacgacaaaccaaaagatagcttatgttacaacgtaactgtgttaccaactaatcatcatttaagtaaaactacccaacattcagtaaccacaaccattactactaacccaacagccgttacggtaaccgtaccaactaccacgataacgcccgtgttaactacaacgacagtgcaaattacaccactcgccaccaatgcaaccactatgttaccaacgacaaatagcacatttccatcaactagtatgacaactaataacgaaacaactgtaccacacataaccactaaagcaaaacggactaagaaaactagaaaaaagaaactcggttctactaaagcccctacgactgcactacattcaagtaatcctttgctaacgacagtaaccactactgctgctaccacagtaccgttgactagttcaactactgtaactactactgctcataccgcattaactactgtgactactacacgtaacgcattaagcactggcatagtgcaattaactactgtgactactaccgctcagactgcatcgcccgacagtaaaacgcgttccaatatccaaaatgctgtaactactagtgtatatactactgaagggaacactactgccctaacaaataccaaacccgcaactaccttacccacgacaacttattctacggtacctcccacaacagtagctaccgcatctacgctttccacaacactacccaccactaggtggtacaccacgtcaactagtacctccacaaaacagcgaaacacacagacctcctcctaccaaacaaccacgcctctcctgaactctcctacagcaaccacaattagtcaaaacgaaacaaagtctccacacgttaaacaccataacgctcatcatcaccatgccgtcacacacgctttttgggttattctgttaattgtagttatagtaattataattttgtggtggaataagattccgcaaagactatttcagcactatcaggaacaaaagtatggcggcgtagcgttgagcgatgattggcagttctactaaatgaccttgaaaccaggaactctaggaaactcgtcaactacatattgtcactccgttaaagaaaccgttctaaaatcaccgtctccaccccgtccaggggccgcctccaagggcgatggccaggcacagatgccataaatgctggctcctgtggctgacggtgattctgggaagctggatacacttgctcaatgctctggaaattgtagaggaatacgtggaagaacaggagatcatcatgcaaacaacgagacagatggcgttaagattggcagctgctcctgttcgtggacgacgatcggagattgacggcagaccgccatccatcccgtcatggctagatgttcggtctccaagacccccaagacgccacgatgaaaacaccatgcaacgtaacattcgctggcaacatgaacagatgcaagttttgatgagcttgcaccactcccggatgcaagctcgaggctggaatcctgatcaacgtactccagccagacttccagctcattttggacgctctgcttcgggttctcagcctgttccaaatcacagaattggtatatcgacaagaccaacaccgatggcagaagaagccgaggaacctagagtaacaattgtccgaaacagacgtccagacaattcgagtcccggaccgcgtcttccacacaaaagacgcaatgctatcactcttacaggctccacagattccctggatctcacaagactgcgccttagctacgaaaggcgtcaccgcaaaggatactgtcgttggaaacatcatggaaaacattcacccacaagaaaggcatacataccaccgtccagaccaacaatttcaaatcccatggaattccgaccagcaccatcacctgttccacaaagacgcaccctgaatgaccgcttaaacgacttgcttcgcagacacagcgcccatgagaacatcaggcacaaatggcatgtgcgacctaaacctgaccccgtctggatctataatgacgatgaatctgaagtcacatctatcggagaacgagcaagccttctcacaagaacccgttcatggatccagagccgtatgcaccgcacacacacttggcgtcttggaagctcagggggcggcaatgaacctttggtgaggtcactatcgacagagcagccacgcaacaacaacgccaatcaatcaagaccgcattcaccatcagaatccgtgcaagtgaatctcgagaccggagaagttgtggttacatgtcacaacacgggagcgaatgaacaacatgtgttgacatccaatcaactatgcaacagaaactccatggaagtgaccgatgcatgcaacagagaaactccacgtcgagcactgctgggttccagcatagctctctggctctccggggtgtggatgcggaactaccgtaagtcgtcctaagatcaccttgacattgcatgctcgagaggtgagtgaatcggtgaaggtgggagagggtctcgcatttttttatctctctctataacctagtgatccgcaccacccaggtgatcgtgctaaggacatagctgccagtaaactctgcatattagctcattgggtcccgccccagcaccaccctaaccttttggaatagaatatatatccaacattcaaaacactaagatttcaccgaacatagattattttgtccaccaactgcactcaaatacaaccagtatgtacttcattattgtattgctgatcactatactaactattgattgcgtcccccctgcctactgggaccaattcctgcatccatcaatggacaatggcgaagtatcggctcccctgatgccaccgtatggtgatcgcttcaacctaacatgtgactttccaaccggtgattggagcgaagcggcgttgcagattcgtttttgctatcaccccagctgccgcagctttctcatggtaacacccaaggacattaacggggagtttaaaaacaaaagcgacaatcatctgccggagttgcagtggaaattagagaccgtcggccccgtacagagactgactgtgtcatttctagttgtcagcagtgtatctggcatttacaggtgtaccattctaactggaataaacatagaggtgttgaagaccgtgatcatcatcgcagatgtggagctacgccgacgacctgacacgtactgcgatatcaggttcagccatctgtcccagttgcaatacctatggacccccaaccctgataaggtgaggctgctaaactgtggagaggttcgcgaaaggaacagtctatggcaaaaacatgtacattacgcggtaggtatgtctggcttggagccatcttgtacagtgaacagagatatggtgttgtgtcatcggtatgtggctgagagtctgagagacaataactgcacgagggctgccgaagagaaacgcgcaatgattctacgcggtaagccgctcgaggaggactggttttggatgtgtatggcaggcatgttcaccatatgtatcgtgggcatcctgacactgtgtttgagactccggtacaagaggcatcttgactggagtcacgatctggagagacggaggttgaaaaagagaaactgaggagttggcattttttttaagttgtgggtattggaaagcgaataaatgaggtagctagaaaaagccatgcgttgtacaagctagtgatttttttaatgctatgtaaatcatggtgtcaaaggtgacgggatattgattataatgtgaaagtgtgaatctaacctgatcggggacatggaaggtgggagggggaagtatgtgttgattatttcctaaataaaacatttatactgttaaagaaactccatgcatgtttgtcgttattttttatattatgaaaaagctatccccacacgatcatgatcctacataaaccttcccaagacaatttctcctgggtacacaaatggaataatatgtcaaacgcaggtaataatatctatccgcacattgacaatctgtcatccgaggagcgcataaacttggtccaagcgccactaccgccatgggcgaccgaaaacgacagtctccaggaacgcatcagcatatttatactgtgcgttgccgtggtgctgtttttttgttttcgaatccctcagagaatgtggtggttctttcgttccagacccgttcgtcattccgggaactgctaatccctattccgcgaaacgagtttgcgtaagggatagtgtttcagaatgagagcgaggcgtgcctgccatctgatttcccagaaatgccgtctccgcgcgagcgcatggcgactatactgaccgccatagggataatgttaatctttctattgtggggcatgcgaatcccccacaccattttccggcagtggaaacgtgatccgggggactaccgaatcagcgaccgccaggaacttggcgattacagcgtgatgcaatctgatttccgaagcacgctataaaaatattaagttccgtaacctggccgtgattcaagccgctgcagcctgatcaccaaacggggaaaatggagcacgctctgttcgatcacttcttcggacgcccccgcgtaagtggctccaggcactccctgctgagagccgagaacgagtgtgatgatgaagaataccccccgatcccgcgggtaccgcaagtgccgccacgagtatcgcagacgacccgagcagcctggaacatcgtagacgtctgccgcctccttccattgcagatgagattgatggtagccgaagaagaggagaagatgacgctcacaacatctccaagaacacataaaaagaaaccccgaaaattagtcgagatcagtcccagaatacggcgtttatttacttaaatcaaagaatgattgacaggtgaagaagcggagcgcctttctgagtttatacaataaatccgcctgattcaatcatgttggcattcgtgtgttttatttgggtgtgattctagtgtctgaatcagaaaatgagtgtgattgtaatcgtaaatatgcaatcagcacgctcacgctatccggcggccactcctacctggtctgatataaatgtaacgtaaatttcataatcgcctcatatcaccgtgcaacgttcatacggcattatcaaattaattactaacagaagagttgcgccaccatcaggtggttttgggaatctacaggcatcatgtcccagctgctatacgaatgttttaaacgacagctgcctaggaaaccaacaaacagtgtggttttcctaaaccgcagagcactgaccggcaaaacagaaaatatgacgtctatggcaaccagcacacaccgaacactgctagttgtggatcatggtaaactgaggctagaaagacccagcacctcggagaccacccagacggccttggcattgtcgttgcagcgatttgcactccagtcatctggggatgatccggaacatgacgatatggaccataatgactgattacggaatgcaaacggcaatgcgatgtgccttgtcactcatgtgcgtcaatggacatttcgaaataccagagacaatgacctttaaaaacaaaacaccgtcaagaagatgcactgcatcaacatgccgctgaggaccttggccagctgccttgtgttcctcacgctgttcgtgtacctgcacagtgattatgtgtacgtatctgtgttgacccgctcgcatggactaacatggaccagtatcggcggcgttaacgatacagagattagcaacttatccaattacagcttcaatcaagataatgctacaaacaccaataattcatccaacggaaatggcagcgtgtcgcaactgtctgacggatgtctcacgcgaactgaaacatacgtgtcaacgatctggatattcaactgcactaaagatacatcagtgacggacttttggtatctaggaaatggatacaatcaaagcgatgacacatgtaaatcatctttagctacatacttgagcagcatgtgtaacatttgggctaattacagcaatggcaacgaatctcgtcaagatcacctgaacatatctgaagtgcggtgcgttattcctgaaacatactccgttaacaccactatccaacaatacaacgatacagaattggaaaatcaagatcagcaatatcaccagctattccctcttcgacatacatgcagcttggtggaggcgctggcctttgacatcgtcgagagatacgtgtacatctcaagattatgttggaacattgcccagatactcgcactgctatgtattgtaactgtcagtcttgtggtttggatacggttccagtattgcggtaaaatcccttgtatgtgcctgctacctcccaacgtttcagccgttcctacgtgtcaagacgtcatcgtggagaatgtcaatcaaaccgaagaagacaacacatctctaaacagccccgtggaaccagagtcttcagaaatcactcccattctatctgcttctgaaaaaccctgcgtgcagaaaccatctgtaccaccaaaaccaccaaccgtatcttctcagttcaaagtgatgcatgctctcaataaaccatgcatgttgccaaaaccaccaccaaagcctgcatcgctccagtctccaaaaccagacgtgtttacgtttgacgagcaggacattcaaaggcacaaagaagaaatatccaaacaggttaaaccaatgcgtattcctgttttggcacatcaaacatcaacactaaccaggactacacatgcttcaagattgccaccgcctcctcggcaagcaacattttcaccacgagcacctacaatgattccgtgggacagaaagagtcaaatgtcaccagtacagtattcctcatggagacagcaatctgaatcgctgcctgcagaattggacccatggaatgtaaacccgcacaggtggttgtgacctgacatgatcggaaccgcaaaagactgacagtacaatatattgcaagatagatatggtgtataattgtgtaaataaagtttatattttataatatacaaattaagcgtgtgcttcttcattattggcgttcggcaaacgaaacacgaatcggggtctgggattgcgattctcgacttgggctcgaatctcttccatgacgaggatcataggctcccccataagtggcaggtcatcatctaaatccataggaatttccaccacctcagccacctcgggaatctgtagcggttggatctggatctgctgtcgctgcagatagttttgaaacagccgtctgcgggcccggggagcgtacatgccgagcggacgatgagcgggttgattgactcgcataaaagatactcgtatagagggcataagccctcgtatagcctccgtgaggagcggatcggtactgcctcccatgatacgccagcatggcagccctcagaaaccaacgttcctaaatactactctaggtctgacgtcagggtggaacatcgccaatttaacctgcaaaaccgtacctatacaaagttacgccccgtcattggtcccttgacacaaggtatttaatgggacgagagccaggaaccgcctcatttgacttcagtccaacagcagcatcatgcagaacatgaagctaatcgcgattctgctggcgatcggtctggtggcagtgcatgccctccccaggtgagttactgaaccgtaacacggacaggcattccagagtacagacatggtttttcgtgtactatacaagtgacgttttgtcgttttacaggtataccacacaagataaagatggagtaacgggaacagatgtaggaaatccagacgggacccagggaaatgacgactctggcgtatctaaagttcccataacgcttgagggtgacgacctcccatcgggggacgatagtacggaagaaggcagtggagatgaaatccctgcatacgatgtattcattgaaggcgaaatgaatgatggagaaaactctgaagaatctgacgaaggttctacagaagactaaccgcagtgctgccagttcccccctttttttatgacaaccacctaataaaacgtctatcgtaatgcctgtgtatgcgtcgtcatgtcctttcatgcgccggctctctacaaatatgaaccgaacaagcatttaccgtgattgcaaacaactatgcctggttcagcactgagcagagctagatcagtgctagctattatcgcaattataatgttagcaatatgcaatctttacaggtgagtaagactgctctagaatacaacctgttattgaaaaagcaacgctcatactttactgttctctattgtgtagctacggatttccagttactcgtcccgacccgccaaatgagaggagcccggaagacattgatgagccacaaatggaatgattataaaaaataaatctttattgattacaagtgtgtaccggttttgatttattgcataaaaagatgggtagatagaaatctgagaacaagcttatgtggcaaaatgggtggagctgcagctgatgcgctgggaacgacgacaaatgctctttcgctcatagatatgcgttttaccataagggcagaccaaatttccactgagcttgcgcatcttcttatcgccatagaacacggtactccagcggtatcgaacaagcccgcgcatggcaaactccatgaccgtgtcagccaccacgcacacgccattctctgtggtagcgtacatgcgcaggtacgaatccgcaaagatgctgattaacctgtccgcgatcgctatgcgacccacgggctctactttggtagtacccactatgcgtcgccagtagtacagatccagtcgactgaaactggtaggtagagacacacacaacatgttcccgtcacccagtctcatcaaactgctagcgtgcgcattacgccactcgcagaggtcattgaggttctcacagatgaccaaccgtcgcgtctctttcttcctcagcacattggcattaggcacgaccatgaagctgcatcttctgagtccgtgcaccagaaagtcgtctatgtcatcggcgatccacgtgagagcatcggagtacaccacatccacatagaggtagacgttacccgactgtccgacatacaattcggaaggcggagtgccttcacgatgcttcaaaaaagccttggtgcagatgctgccgacaaagtgtagtttttccggacagcagagatactgtgacagacgctcttcctccttttcagcatttcgaaccgagcgccaacgacgcagaactaccagaacacgatctttaggccaaggcaggtgtatgcgttggcccgatttccatttgcttctgttgacgccgcttcctctgcagcacgtaccccaagtgtaccagcaaaacattgtgccgagccccacagagggaaaggagccagctggcatagttgctttatacaagcacgtcagacgtgtcccattgtgcaaccagctgacgtatgtcagtcatcgttgtgctggcggcctctgggacactcgggcacagtgtcgtgtaattcacaatctccagtgaatcgccgattattcaacagttgccgtagccccaaacacatgaaggcggtcaaatcgtcggcaagacgaatgtagcggagattaacgaggtcgaggcagaacacgcggccgccatccaccaggacaatgggaactctggtcacgggccatctcacatagcatggagacgagggcatttcacctttcagatccacggtgcccaaacagatgacctggtcaccaaaatggctccgaagcgagcgcagcataaacccgctggttgaggtcacttcaaaacacttgagattgcacagtctcagacaggccccctcaggataaggcagctgaaggtagttaccgtgattccgcgttacataacgcgacacggcctcagggccagatttccaagcatttctaatacgcctaaaagagcgcttgagggcggatgagcgtatgtggcgaggacagtaaagaacatccacggcccggagacccacccgctgaagctccgagaggttcttggctacatagtacagcgagaaatcttcttctacataacagaaaacctgtccctcttctgatactagaatgatgagggtggtcttccgctgtccgtgcaccagcacaggttctccaacgacacgccccaggaacgccagacgcgtctgacagcagaggtagtagctgaggcgcctgatgtcctcggcagtgtagtcatcatcagcctccagttcttgcagcaccaggtaccagccgcgaggccagggaagcgcaatcttttgtcccgaattgagcctcacgtaggcctccacgcaacccagcccgaactcaacactcatggcgagactttctatatcgctcatgggttggcacgccatctcaccgcaagactttacactatataacgcctcagacgcttgccacacaggaccctggacgtcgcaatgtacaccaagcgtgggcaacagcgtcgctcgcacgagggagccgggcggctttatacctttgatgatttggacgatgaggtgtttcttgacccaatcccccgcgccccagccaatgaattggacgaaatggacttgatggaagccggtttgttatcgtccagcagtcaatccgataacaaatcatcttttgaagtcgtctcagagacagacagcggctccgaagcggaggcggagcgcggtcggcgcgcggggatgggcagtcgcaataagcccaccaaaccccccagacggaataaaacaacacaatgtccgacggggtgcgtcgccagcgaaccagtaatcagtgccatcagcagcgaagacgagggggcgaccacgcagagccaggaagaggacgacgacgaagacgaccttgacgagggtcatgaaacaaccatagggcagcgtacggtcactatatttcgtcagatatactttgaacgttcattagcacgtaacctgggcttcgaacccaccttgatttcccctccaaacaccgaattcctcaagttcctcttgtatgatttttccgtgcaacacatcacccgagtcaatcaatgcatacccatgcccacctttctactcacgagtctcattaaccctattgcgaaaacaacttcagctggtgagcgcgatttaacgcgcggaatcgtcacccatgcggtcttggtaaactacttttaccaagccaaggccaaagttcgaagcatgcaatgctctctaaacgctaccattcatgggcaaaccatgaataacatagcaacttatgttactaatttaacaccaggtggacgtgcggccgccctagctcttcattttctcatgcctcaaaaagcggttatgacaaaacaataccaagcgtgccttcggcgactgagcgaggagctccgcaaacgacgcgtcacagagtcgcccagtaccttagaaatcctagaaaccattcgcgactacaatctaatatttcccatagccccatacactaaccggggggcactgtacctgtaccgcaacaatttgcagaaattatctaacggatacaggaacgtgctaaaattactctcgagcgagaaactaaatgaagaacactttgtgaatgacttggcattcatgcttggggtccagttaatgcttgtccagtttgaacaaacacttcacgtcctccgcgcatacataatgcaccacctccagaacctggctactctaatttacatcatctatgtgcaatttccttctcttcggggcgactatattcaagtgaccgaggccatctatcgcgccactactagccatggcgatgaacctctgtttcaggttaacacatggctgtttgattatctcagggcagtaagaaacttagaagccgtggtgtgcccagattacatgatgtgtgcccttcgtcagtggactacagtccacgaggacaatccaatcacagactacatgtttcatgatccggccatacaagactcacgcatacgttgcggagacactcaaaccaaacttttggttcgtaatttgtgctttacacgcatgcaagggcgccccacctctcgccagactcccgtagagcacgtgctcgtacccaccgcctccctcaacaggccctatctaagatgtaattccacggaagagagggaagtaaacagtcaccgcaatctgacattgcgatcgttcctagaaactaatggcaatcaccccatgagccagctgcaataaaaaatataacaaaatctttattgattgggcatgaataatatacacatatgcatacaacatttatgtagatgacgaggatgatgttccaaccccgctttttcgtgcacccgactccggctgaagagaatagtcaagggctggtgtaaataaagatgatgacataattccactggcaaacatctcttgcgtgagttcttctgggtcctccccttctaccaccgcgttctgtcgcctcaaacagggtcgggtaaccaaagaggccgacgcatcgctctccgaacgacttccccttctgagtcctcttcgctgagagtgctgcaacgctcccgctcgagctcgccttacgtcatcaaagtagccttctcgcacgccctctttgagcaactcagataacgagttggccgccttaaccacatagttatgctcaccaatctcataacaaaaaatgccaccgcacccacctatggcggccaccggtcgatcccaagtaaacatctcatcggtgccaatggtgccaatcacgcgcaactgtcccttcatgagcggcaaaagcctccagtaactaaagtcccggggggtgagaatagtgtcatcctcatcgcagacgaacaacgtataacctctaggggagggcaagtcaaagtgacggcctctattccgtcgcacataatcttcgacattaaaaacgcatccagcttcccggctggtggccatcctgattgttctggtgccaatgacatcattctgcttttgattgatttcatattgcacaaccgcccacctcgtgtggtcgaaaacgacgaacatacagccggtgaagcttctcaatgtgtccctgataccgcaccgtgaccgtggcgctggtcgggatttcaaaaggcgccttgcggcgacaacggttggcgttgttactgagctcgcaatctgccagaagcgagtcgaaagtcattaagagacccggatccaaagtcacgtcaccatgacgaaaataataccaagccagtttttcgcccttccgcgtctctgcagatggacactcataaacgcggcgcagtctcaacagatgcaacaggaccaattcgcgcttgatggtcagtgaaatgcactgatagtcaggaatcttgttaactatcttaataaaatcacaaaacgtctctaagaaattggaaacggtaaaatgaatgtgcttcagatcgtgaatgtgccgtctaaaacgggacagctccatgcgctgtgtcgcattttgtgctaaccctttacggatgatggacgcctcgtaacgaaacatcctgataagaaaagcgacatctttacacaaagcacgtacacaagcactatgttcatgacgaatagtgatataaagcagcctgatgactttgagagccaaaacagcattagacatcaagtacatagcataaccttcgcagggagtaccgcaggacagccccaccggcaataaaaagtaatcgtctaccagagtgtgtgaccagtccgtaaagccgaggtccctggccacactctgctgcacacgcagctgctcagcagctgtcaggtgacgaatagccgggagatgaaactttcccaaatgagcattgtgaagcaaagtgagctcggcgtcctccagccgaggctggggaggagaaggctcttcttccgatggtgttgcctgggtatcggatgatgccacaaacaaatcatggcagtcaccgcatgtgcaaaagcgcgcgtaaagagtgtgtagtgcggcttcggcgcgcagagcaaatcgggggttgaaaaacacagcattcttttgaacgcggtaattaacagggagtttcttacagaggtgagggggtaaacatttttgaattaaatccctatcaccggcatccaaaaacaaacacacggtacccgccaggcgccggaacagttcttcggtaatgacacaaagctggcgtagatagtgagttttattgccaaaaactttgtagtttaggagggtagacacagcgtactgtccagtggccacggctagcgcaatcctttttccgctcttgctgatctctggcagaaacggacccgccgccacgagccttcgaaactgcatgaggttcatccagtgaaagtgccctggatcgggtctaagcggcacgccgcgtaacagaccccagacggccagatcggtttgaaggctcagacctcgaatattgtacttgccgtgtgccgtggcaaatttggaattcaccagaaagctgcgacgtatgtagataatgggactctttttagcactttccgcattctggaccacccgtgtatcgcgaggctttttggttaaagaagacgaagaagagtcaacagggaacaagccggcgagagcggcctcgcgcagactgcgcaccggcgtgagataggtccgcacgaagttgtgacaaaaatcatcatccggacagtcagcgacaaactcgaaagcggcatgctgatcagagtaaatgtcatctagcggcggattcgctgtcatgtctgcgcgctcgcagcgtagtgatgaatcttaactatataccctaagtaactgggatgtctgccaggccacaaaaaaaaaggcgcttcaaggcgccgcagctacagattcgtcgtgcagcagactgcgagtcgagtaaacgtattcactcacgtcgcagaactgtgctttttgactgctgacgggcatcgacacggagcccagaggagaaaaacagaagcgacgagagcagcgaaaccagaatgagccctgtctgataaagccccgaagcgtttcggccaatttcagcatcaccgtgccgtagagcagcacatgcacacagccgttggtgtccagaaaaacggccttattgaccggctcgatccagccaatgacagcgtacttggccctctcgagaatcccgatcacaaatcggttggcctcgttcgcctcggccacattccaggaaccgaaagtgaaagtgcatgccggccgaccacccaagcgaatcttggttccagcatgcaattgacagaaacgcacgacggccttgcggtcatgcaacacttgagacagatcatacatactggtaaaattgtgttcataccaagcaccctccacgatctcgtctacatattcccgttcaaagtagctacagacggcaaaaaggccggtctcaaagagttcgtggaacgacaccgccaatacataaaccttgtcttccgaaggcatgtagcagaacacgtgtccatgattggaaacccaaacctcgggcgactgtgccgcttggggcgaacattcatagactgtgatgacacccaagaaatataacctagaagcttctcgaaaacagcagaagcgttgataggtcttcctatcgcgcgtcaccccaaagtacttgagatcacccaggagaatgccgtgcagggggggccaagcgagaggcagccagcgccccgcattcgcgcggacgaaacgctgaagatgcaaaccgccagggcgctctcgggaccgtccgcgcgtgttgatccaagcgtcgcgcagacctcgccaaaacgcggtaaatctaggctgtcctcgcagatagagcgccgtcagtggctcaaagtgccccaccaccatcctgtaggggacaaggaagcaatacaagatttcaataaatttagcaaaaaccacacattggataggattttttctttccctgcgagatttttgttaaaaatgaaatttacccatgtattgtttcttgtccctaccttcgcttcttgaacggcagtgtggtacccggatagagctcgtaaagcgtgtgacgatccacaggtccgatgttttcgtaacgataatcatcaatcagcggacacagtccgatacgcacaaaggttttcaggtcacgtgctatgcgcgtgaggcgctcctgacccaccagcgccacatacacaatgccagaatctccgcagaaaaccttaacccgctggaaaaatgttttattcccttccccttcaatgacccccagaagcaaaatgggttcacgaccatagctgaacctctgcaagcgccgtatagcgataggcgacatttccaaatcctgagcattggccaccaacacataatggttctccggccagatgagtgacagcttggcgttacgatgttcctccacatactgactcctgtgctcgttgtcggggcaatccagaagctgtctgaaacacaacaacgagtgcaagtaacgctcgcgcgtgctaatgcgagaacgctcacacatttcgactttttgcgccgatgacaagggagaaacatccggctgcatgcgccggcagatggtctcgtgcacgggatcgcatcgaatcatacccctgataaaaaagtcattgagatccgaagccacctcgtacagacagtcctctttagcgtcataaacaatgacagccccgcaaggatccagaaacacagggtacttgttggtgtaatgcgacacggttcccaggggttgcagaacacgagattccccgaaaaagtcattttgacagtgctcgagatcaatttctgtaatggcgtacggcgagtacatgccgccgaccacaaacgcgcactgagcgggccagcccaacgacacacacgagccctcgaaacgcataagatagcgtttgaggccttccgagtcacgtctcatacagagttcagacaagctgcgcgaacagaacgtttcgggcgccgccgctctcttccgtcgaaccaagcgcggtcgactctcgtcacccatattgcacacgcctttcacctcggctcgctcagcgaaaagtgtacaccgcaaatgagcgaagatccgcgcgacactagcaacctttatagcccatcatcatcccacagaggcgaaacaaacaacagcacacttgaactttttcgtctagcatttcatctttatttaactctgcgttaacctcatgtcgagccgtatcccaaaacacagactggtcttcggaagataaagtatcataatactcgagcattcgggaaacatctgccacggctacgcttccccgcagaaaacgtttcaaactttccatatgccgctgacgctccgacatcatttcaacctccagaacagatgcattcgcgcttcagattctgccgcgcccgtctcagctgctgtaaacgtcgatgctgtactcctaagtccacctcccgattgaaatcgtcttggtcgcgaatagacagagtgctataaaattcgcaaaaggcctcgataccgtccatatctagctggggtttaagacaccatctcactcgcatctcccagaagtacacccattgaacgcttcgagcggccgtgctgacagccttggaacgacgtttacaggtcggaaagctacccgtgatttggaacttgatcttatatagataacaggatgtccgtcccagcaaatgtcgaccccgcaacccaatcatcggtcgtggaggagtcgcccaagccctcatcaccatccaccgttgtcgtttcatcgtcgtcatcatcatcttcatctccttcgcctaccaaaataatacagccgctgtctcaacaactattgccccaagcaccgcaaccgggaaacatcgtagttgtccccgcacctggcccggatccagattatagattacccgaccttcgagtggtgcggctatggctagaaactctcaaaaccgcagacagggacaactttggtcgctgcgtgcgacatgcgaaaacgcaccgcaccgcttaccacttgacagcgtacgagccgtacctcatcgctctgaccgatcagtacaacggcacgccttccgtgacagagaaggcttcgtatctgcacggctgtctgtttttgtcattccctgtgatttacaacaacacacaaggaggcacgtacaagcatgactggagtaacgtatcggttccgcgaaccatgctacgcgaactgttttttctgctgtgttctaccagcgaaagcccggccatctttcaacctatcattaccaaaggaggcacgtgcgcctccatggtggtgtatcccgacgagacggccagtaatttcaccaatccccaacacattggtttcgtatacagcaaactggtcatgattccctttgttccacacgcattcccatcgtacggcgttcccttcctgaccttaccgactcacatgcgttactgctggatcgaagaagcgcctttcggtcatgctacgctgacgcgctacaacgatcacatgctgttccacgtagaacacttaacgtggacgagcaagaggattactaatcatggacagaagaaaatgtcacgatacacggctcaattcaagggcatgttaccagacacgtatcttaatgggactcatgtttggacatcttccaagaacatccagtacgaattcatgggattgctttttaccatcaacatcgacaccctgtgtctggatctgcatcacgggcaatgcatcggatccatctcaagttcatactgccaccgtgtggcggacaaattaacagccagaaacatgcctcgatcattcgttttttatttactaattgagaatcaacaacaatgtactgtacagttcaatcgtaatccgtatttgtttttcagcggcgacgggtttaacagcccgttgctgaacgaacccagtcccttctatctaacagttcacgctccctacgacatcaattttggacagaacgctcggcagacggtggagatcgacattcgctacgcgcacacgggcggacggtgttttttggtcgccaacctgccgtacgaagactccttctacaccggcatgtgcgtgtggcaggcagatgcactgaagataactctctggtcgcgcttacgcaccaccattattccccaaggaactcccatagccgtgttgtatcaaatcaacgagacggatggaaacctgtacgcgtataatcacaacacggttttccgtcaagtaaaccatgccgaaagcacggccttttaccttagcgatctgaagctccctacgaataacttcctaacctcgccctaaaatataaaatttattcctcatttattctcgagtcttctttaattttttctataatagcttgaacgttatctggaacgggtatagtgcctgacgattcatctaacaaatcttttaacttagcttcatcggaaagttttggagtatttcttggcgaggttaaaggctccgctttcattttttgcgcacgtccacctggaacttcagtagacgatgcagtttgtgcttttgtggacgttgtggtagttaaaccgggtgtaaacgtttgaattgtcgtgggaaccttcacgatagttacatctttcccggggattggcgcagaaaaactggcaggttttaggacactgccatcgacagtgagaggtgtagccttaattacttttctaggtttaagaacactcgtgcttggcgacgtgacagacgtaaacggaccaaaactaggcttaggctttggtataatctttgtttttggcttcaaaattaaccgacgttttgcttttgggtccgacacaggagggacgggagtagcaggaggaatagatgccacactaaccaccgattcggcatctgacgcctcttcgtcaccatccccagaagcaatatcttcatattcactctcacttatttctgcttcgcttttcacctcgcgtcttttgttaggtgaaaaactactttcacgatcactgtaatctgaagcaggtggtgtctttgtctcataatctgagatactatctagacccgaaacctcttttaacggggtctcaagtccaggtattgtttctgatgaacccgttgcgaataaaggattcgaaaactgggtagcaaacggggaacttagtatcggcgtctgaataaatttcggaagttcaaacttgtatgtagatgtagacggtttgtcatcatcgtcaagttttaggcttcctaaaccaccatcaaaatccactaaggtgtctacttttacatcatcagtttcatctttcgcgcgaccctgattttcatcgtccgaccaaaacgttacgcgtttactaacagggtgaggagttttaggctttgtatcccagaactgggacgattgtttagtaggtgacaaaaggctaaaagcatattgtctttcactcttatctggcactttgcgttcttgtttcttggtggtaagcaactgaccattgtcgtcatcatcatctttagtctgtcgcccttcccaaccacctctcaaccatttttgccactcgcgatgcagttcttcgtcatcatactctaaagaaaagggatcacccaagctctgactgacagatcgtgggaaaatatcctcgtagattgcaaaatcttccatcagcatctccaacaacatatcggccgattcaccgtcaataaccttatgtttgataatgttagagcagtaattagattcaaaagacctgcaagatcgcagctccttcatcagtgtcttacatagctccttaatcttaatgagacacttttcggccaagatgtcccaagaggttctgacatgaacaatcacttttccgagatagatgagtttgttagtggcatttaccagagaactattggagtgacgctcaagatgaagcttcactggccgtatttcgaacatattgttagatatagctagtaaagaatcttctaaagccatgacgtctttctgacgaagttgaataaattctatctcaccagtacccaaaggctgacactcagacaactttgccaaggccgttgcacccaccatggcattctgaatcacagtaacatccgtccgagaatcgtcaccaaaaacggtggcctccaaagttcgcaggtgaggccgagcctttactggatctcggaagggatacatgtgtgctcgccgagtgacagcattagcattaacctcaaactcatctaaaagcgatgataaatcaggaatatgatagcgcaattctcgatagtaggccaaccagaggactaattggttgaacagacagctccgtctgtgcaaaaacttttcgccgcattttctgagaattttaggatgctgctctaaatctacgttctctttagtcggcagggtctttaaaaagttagtgatggcagtcactttacgaggcggcagcccgataaactttaaactcatgattgtcagccacagaaaccggaaatttcacgagatacggctgtttcagcgttctgctatccgtccaggcgggttatggaaaccattcttcacaaccgaacggtgagtgacatttaagacagtttaatagccaacactcgtaacgtctcggaagctgataagtttcgtttttccacagagtgaaactaattccattttgcacatcaacaccacctgcaatgtgaccgactcactgtacgccgccaaactaggcgaagccctcgtgaacagcgcgctagctttattcggtacccccctcaacgccatcgtcctcgtcacacagctattggccaaccgagttcatggatactccaccccgattatctacatgaccaatctttactctgccaattttctcaccttgatagtacttccttttatcgttttaagcaatcaacaccttttacctgccagtgcagtaacctgtaaatttctctccctgttgtactactctagctgcagcgtaggttttgctacagtggcactgatagcggccgaccgataccgagtgattcatcgccgaactcaagctcgccaatcctaccgtaacacatatatgatagtaggcttaacgtggctcattggcttgatctgcgctacccccgggggggtctacacaaccattgtagctcaccgcgatggggaaagtgatgctcaaagacacaatacttgcattatgcactttgcgtatgatgaagtttacgtcctcatggtctggaaacttctcatcgttttagtctggggcatagtgccagttgtcatgatgagctggttttacgcgtttttttacaatactgtacaaagaacagccaaaaaacaacaacgtacgttgaaattcgtaaaggtattactcctgtcattcatcatcatccaaactccctatgtgtcaatcatgatttttaacacgtatgccaccgtaggatggccgatggaatgcgccgatctaactagacgccgagtcatcaacacgttttcccgtctcgtccccaatctacattgcatggtcaaccccatcctctacgctctcatgggaaatgactttgtgtctaaagtgggccaatgctttcggggggaactcacgaaccgtcgaacttttctgcgttccaagcaacaagcccgcaactcggacgatgtaccgacaattgtcagtcaacaacccgccacacccaccatcgtcaataagcccgaaaaaaacccgcacgtaaaacgcggtgtatctttcagcgtcagcgcatcttccgaactcgcagcggccaaaaaagccaaagacaaagccaagcggctttccatgtcccaccaaaacctacgtctgacgtgaattttcctagaggctgcctccacgggtttacatacatatctcggtacttgctacacttgatcactttactgcggacaccacggccaatcgcatcgggtaggagtggcgacacggcattataacgaaacgccggctggtgccacacgccactctgatagattgccgtgagtctttttctcaaacggtaggatatccgcattcgagatgacgatgaacataatcattactacccgagacttctccaacgacgaatctgtggtggagacggcggaactccacaacagcgtcgccaattccatttccaaagcttacagaggtacgatccgcgcagagggcaagaagaaattgctgattcgcaacttgccagccgcacctgggtgcactcgacgcaacagtaatttatttattttttgtcatgaccgggactatcgaaaatttcaccagggcatcgtgcagttaaagcgcacccgcagccaagtagacccctccgacatcgtgaacgtgactaagaacataaaatgtcgcttacaaccgcacaatcaagatccaccgttaattgccggacagcttcagaacaccatcgcgcacgtctgtaccctgttcaaccagctggtattcacggcccaacttcgacattattgcgagaaccacgagcgagtcgtactgtacgcacgagacgagctgacccggcgctgcggagacaaatccacgctaggcatacacatctatcaactcatctcgctgttggaccaagaccgtcacagcgaattgtgccatgtactcgttggcttgctgcaccaaacgccccacatgtgggcccgatcgatacgccttatgggccgattaagaaattacttgcaacagaggtttctgcacattctggtggaaagcggactccaggttgatagtattttcgagagttgctaccacagcgaggcataccggctgctgtttcagatcgcacaaaacgaatcaaacgcctcgctctcttacctattcagctagcgttttgcctgtcatcgaaaacgaaactgaagctacacctgtcccgccgtgtatttaatgaaataataaaatgtttcctatgaataaataagttttggtttcgtttttgaaagagctaccatgagtctccccccgtcgatcccagccctgcccgtagacgccagtctaaaccttcgcccggacttgttttccgatgagcaccgccacttgttggtcgatatactgactcagggttgcggaggctacgtgggtctgttgtgttacgggcttcccatgcctagctatgtactggaaactctgattgactttcaaatcaaaacgatatataccaaaattaagcagatcgccaatagcgttatcagaatatgtatcttggctaattatctaaaaaacagtcaggatctactggtcgatctgcaagctaacctagacgaaataaactcaggtgcaaacaaacaaagattgtatcgcggactacataggatatgtcgccaaacaaacatgatggatgtgtatcgaaacatgagtcaactgctagatgccggggacgtaaccatgggtgtgtacagacagggcctaacgcagatgcgtgcgcttacagaagcgttggatctaaatcgggaacccaatttacaaccactatacgaaacgctcaccagctacaacctcttgtacattcccccgccatatctaagcgctaccgctgtagaaatatacagcgaaaatctcagcgatctaacaaaacgcattaaccgatcgtttaacttgcaaacgcagattaacagatctaaacgagccgactatgtggtaaacgatgtactgtttctgctatcggcccgacatttacaatttcgccatagactggaactacagatattggagacctggattgtgaacaaatgcaactacctatgtaatgacctgtatttcgcatacgtccaggttccggaatgtcgcggcacgttctgtaactttgtaagcggtttacaagtcgtccgcaaggaacgtcatccgacattccgtcccttactacacaacctgtgtagccttttgaatacatttcacgaagccaacgtgtacctctgcccccaatatttacatagcgccatctttctactgctgcggagagtgtccagagttagagagggcgactcttcagactcggattctgaaaaccaggaagcagcagaagaccgagacactctgctaagacgctttcgagagggagacctcgatctcgaagtggatcctacctccacccctttacaaaacttttactttgccaaaaacccttttggaaattcggaaatttttcgtattccagaacaagcgagtcgctaccttcgtcgcaacgcgtggatagaccgcagcaacttaacatacatatcctataaactccacaacgggacattatctgaagagtctttcccgatgcgaaatttgtacagccttattatggaaggcgcttcgcgacaagcgggtactaacgccagacagtttatggcagctctacaacaagcacccttaggacacgatgaacccggagcagcggatcatagcgatttgtttgccgatgtggacattcgacccgcacaaccgtcctcagggtcctctgcctcattgtcaacaccttcaacgtcttccgccccctccggccaaccctctcccagcagactcggacctgaacaaccgcctcgtcagagacgttatctcagtttgagcaacttttcaccttattcagtggctcgtcatcatcatcggcgacggcggccgcgtcctcctcgaggaccggctcacacctcgcggcaaggaccagacattgctgcctcggcctcagcttctggaggcgaggaccccagagacagtttggcagaagaactggaacaattgtaggtgtgtatatagacatgcacggaaactttacaaacacgtttgtatgatatgtaataaaaactttattttgtatatattgtcgttatgtgatttattgctacacatcaaataaacatgttacacataggaaactctagcacgacccattccgcgtccggagcgaaacagtcggaggcgccgactagacacacaccgcgtgcacacagtgtcgtcaaaaagatatcctcggactgtttcttcgcggtctgaatcgttgtcctctgcgagtccaacgaacgacatgtcaaaagctcgcatgtccgcaatattgccgagcatttttgatctaacatcttccatatcgtagatcagagaaggtagcaaaggtgaatcggaaagggcttcgagatgctgaggccagaacttttgagtgacagacgagtcccgcatcatcatgtccacgccaaatctgatatcggcttttatggcttcataaatgcccacaacgacatcggcctccgttttgggcggtttttcgtcttcactgtcatcattgaacatgatcataggatcactgggttcttcaccgtgcatgcaatacgggaccttttccaacctaacgatagctgtgcgtctcctatcgtgtctgtgattccggtaacccttttttcccatcatgcaggtaaacattcgcatattctcagctaagcgatagatggagtttagggcgggatcaaagccataaattgtaccgaacttgtcaactagtacatagagtctgactaggaactcatttttttctttacggaagcaacctagcaccccgagcaattgattaacacacactatacgagccacgcaacgcaccatgatttcaaaggagcgcagccctgaaggtgacatgagactaaaagaagtgtcttgaaaattggccactgcgctgtcactggaccacaaggcaaaatgactgtctacttgttcacccaggggatccctaatatcgtagacgcggtaaccgttcttcgcaaccacgtccgatattctgtccacatcccagttgaagatcataagctcctttataatttcatcacagtcaatcacaggttcctgatacagctccattttttggagatagtcgcaacgacgtagtccgagttggatgaaggacttcatgtcaggtgccaaacaatacacgcacttttcggtttcttcataacagtagatagcaccgcttcgaccgatcatcatgacgagctggtagaagcctagcttcgaaagctccaccactccaaacggctccatgagttcgttgcagcacacgtactttcctgataacagaaaagtactgttagttttccattatcacccttaaccccccccaccctccctaaccaacaatcctcaccttggcagcacacatcgtaatacttggagctgaatggtcccatgagagtgcggggacggagctggatatagccattgtcgggccaagcaagatgcaatttggttccacattcctgatccacaaatgtgtataagctagcaggatcttgagcgcgcactgcgatgcagccatatgccatcaaagtatccctaagatcgtccatgcccgacatcaaccggtaactcatacgacaaagctgaggttatgtttgttgacgaaccacgttgagttcactgaactgtgaccaagcgacatctctcactatttatacataattctccagctcagtcacaaaaatctgctgactcattaatgtagaaaagtttagatttctgagccgcgcgaatctcccgtcgcgcagcatgcatctcctggatatcggctcgtatatgccgttgactgcgtcccaaaaacccagcaaacagagccaccaaaatgaaagcacccaacgcgacagaagaaatgctgaataatccccaggcacacaatgtcagtttcgaagagacaactctagaagaccacagctgcatgacttgtgtccacgtgggccattccaatacgccgtaagtggtgttatccgcgtagtcctgatcagtgatgtttaccggacttgcttcaaacttcttcaggcggtatataagacgtatgcagacgtcactcaaaaaataccgatcagtgtccagatgtctttccagccatgtagaaacataccctttcacagttgaattttcagcttctgtagagttcccctgttgccacttacagttagtgtttcggcgatctgcgcttgtcgccgataacacatgctgtccccaggcttgactttgtaacacaattttgccctgtgtcacgttacgactggaatcgttacaaatacattgcaacattcccgtaaaagatgtagacagattgctgagcatatacaggcgatacataattcgcccgcctacataatactgaagaccaatgttcagtatcatactatgccaaacacgacgtctctttggaaatgtcatgttgagtctcagtttattcaccgccaagtgacaaggtccttgatagatgagcgtcccattgtaagtgcagttcaattcacatttcatagtgtcattcacatcacccccatactggcattccagagacaatcctttgactctccaccaaagcgccaggagagcgaggcaaacctacacgtcaaagaatggagtcaataccacataacactcttcacacacgcatattcatgacacacaaagtgaagattacctgccaagcgcagtaccttcccatcatcactcaaaacaatgagacacatgaatgcaggtgaagaacaaagtgctttattacaaatgcagtgcataatgattgacagcaggcgtgtctacaagcaagaaataaacagtgcgttttacagagatgcagcgccctccatcgtcaggtccacaatagactcatcactatcagagtcgtcaggatgtgcgttaacctttttcggattaggggtagggagcgaacactgccgagtcagtgcctttttactgtccacgcccctctcaggctcttggacactcggagtcggaagagttacgggaatcacgttggccatcaggctatctctatccacgaacggcaccggaatcttgccctcccgaacgcgtctttcggcgtccagcagggctcgcacataaccgcagagaaatctggcaaacgtccgaggactgttctgattcttctgtctgcgggcttccaacacgtctcgctggtggtacacctggttgaaaatcacaatgagatcgtccacagatttggcatactgcctaacccggtgcctgacttctaagggaaagatgccattccagtactccaaaacgatgggagctgtccaaaactcggacatggtaggtgccatgaagaacaggattccagtatcataggcgtaaatgtcatagttatcactcataaacagcaccacctgtctggaaggtcgaggagcagcctcgtcccaagcctcgataactccaaacatagttaaggcatgactcaggggcggacaattgcgctccagccaactgattttacaaaggttaattcccaaaaacgtgtacgtatgatcacatatgcacacggtaacaccaaattcatgcttaatatgtgtttcacgcgccatgagcttcttcacttgagccctgagcgccgtcttgcccaacacagaagcctgaatgagactgcctatgtccatctgattctgttgcatcctctgttcctgatcgtattctgcagaagtagccataatgatgttttcttaccggctacttcgtctgtgatgcggaactaatcttcactgcgcttcagccgacagagacttcttttcagcgcaaaaaatgcctcccggaccagaccggcgataccgtctgcgggggacagaacagtctcttcttgttcttcctccaattctcctcgttgccgcttcacttctctcagatattctttaaaccagggaggcaaaggaggaccctggtttcgcttgcgctcaatccactggtagctgagaatgccaaaagccaccataccaagagcacccgcgcagttcacatactgaatagggatggcaggcatggtgaaagcctgtctgagcattgaacactgttcatcttatatacacaggtctcgcatcccggacgtgacggccgctgatcacaacaaagaggcacatgacaattgacggattggaaaaggtgatgatagaaaagaccctacgtatgacaaccacattattgaccgcaaacacgacagtaaatattcggattacgtctatttgtatgtagcaatggtaagtaaagcatgacacacgttttcaatgtctcaatttccccaatccgtgttaataattttgcgaataaaacacaataatcacaaatgttcaaaatcatacttgttttttattaacaaactctggttagattatggaatggttatcatttcagaagtcatcgctttcaagacacccaggtacagtgaggccagtatatacacacacagggagtcaaagcccagagacgcagcaggataaagtcccaaatagcgaataaagtccagcagtctggagtttgcttcacaagaaagcaagttgatgccccccttgcatgtagactgaggaacatgtccgttttcatgccgcacactgctgacgatggcactggacaacgacccattctgacagcggtctccgttccgcgtagtgtagttggtcaccgaagactccaaagtaatacccgataagcagtagagtcctgtcagaggcacattgagtacacggggttcattcactccgggtatgtacagcgatccaaagtacgccggcatacagtcgacatatccgtatttatttatcggctgcggtacccccaaagccaccgtagacagcagagtcaggcatcccaccaccagaagcagagtcctaggagccatcaccatcgccacgctgagcagcattgctgtgagtgaagggtgccaagtatgagcgcttaaaaagtcttgttccaaaaggttgcacaacagtaatgattcagaactcaatgtccttagtactaagcggcttcttttcccacactatgtcctcttcttcctcatctgtggttagtaaatgatgatactttttccgagaccacacggtcttcatgagacaggcaaatatcaaaagaaacagccccaagacaaaacaccccacccccaccagccaaggacacggtagaaaatagttctgtcgaagctcagtgaaactggcattacaccacaaaagcatcatgttgaagagtggcacgatgacttcagccttcgcattccccagtgacaaaagacacagagacagtttgtagtgacagttatagtattattgacgcaacaggcaagcacagtccggtttgattttcaacagctcaagtgcccttattattacttttgttcaaaaccaaaataacggagaccaaaacggtcatcaagatgatccctaatagagagaccacaaagaccactatagtacatttccatccatcatcgtagtacgcttccaccggggggtgcatgttagctggaaactctgtcatgtccatacgaaaattatcaggacgcggagggacttccccgacgaccgcatgatacggaggaggggggctatcagggggtgcatctgttgtgagtcctcttctattgcggcgcgactgagtaggtaaatcacgaggacgaggcggcgagcccacgatttcatcataagcgggaggtctaacatcttcactgtcgttacggggtgatgattcattcgtcgctgacatgttttgaaccgggacagaaaaatctgctcttttgcttttggttgcgagtttgcttgcggcaaaaaggttcccgagggcacgtgttgcacaggtaagctggcgggatgttgcaatgcttcttgtgacgaacgcactggcgacagaaatattgctgatttcccagtcgcagaacgccagccctgaagaacgccgggagactgctggctaagtactcaacgcgcttggtgtctggattgaccgcaaaaactctcagctgctcgttgaccacaatgggaatgtcgatcaatttctggcgccagagcatagagagcacgaaaatgtgcagcacgttgactgagccagtatcttttatccactcctggtgcgccggattttcgtaggtacgctctccctccaccacctcagcgaggtaaatgttctcggtgcacgtccaggaaaattcctttcccgcgtttctctggcagagtcgccagatgcccataagatcagtaggaatttcaaactcaagggccagcgaatcaccaaaactgtaacggacgggccccagtttttccctcagaggagggtatttcataagaccctccgtgagaagagaatgaaaaccggtgcgcgaaatcagttgcacgctgtcacaatttttatcgtgcacatacacgcgccccccctcactgagcaaaacaatgaaaacattgccagaggttaaggcctcctcgccattgctcaccgtgcccacaggtatcaaaaacttatcgcagcataggtacttcttttccaaatctttaatattgagacgtccaaaagttccctggcgcaggaaattccgataggtgaagatccatcccctgggccagcggataggaaaggtggtcccgctcatctgtcgaacatgctcaatcagtcgcttggccggtttctggctgctcatagaacatatgaaggtgtgacggacgagaacatcggcacgctccatctcagagagaatcatggatgatgttgacaaacaaacaccgttggacagagtcaggaatggcaaaatgcccaggaaaaatatacctgtgtgccaaatgacgcgccgaccacaaaatctgcatgttcgtcatgtgtttgtctatgtacatttctgctttttgctgctaggtacgaattcgaaactgacggaatcctcgctatcgctttcttctttggcatcattaaagtaattagagtttctttctccagagttggcggctcctttggttgtcaggtagctggtgatcttgtgttgctcgtacttttccttggaattgtgatcgtgctcattggatttccgaggcggcatgcgttcatgcttacgactgacaggctcggacatcatctcggaatccagtcccgagccgcagccgtcgtcatgcatggcgcctgaattggtgaccgccaccgccctctgctgtttgaaatttttatcgaagctgagatcgctgcgctgaaaaggctcctccgtgagaaagttatctaccgcaaaaagaccgttatgactagaaatgtgcaccaccgtatcatgctcagtgacgattcgcaccgtgcacggcagcttggtcaccgcacagttcatgagcgtttggtagaggttcttgagctgcacgtgaacgcgcatgttttttacaccatgaaaactgacgcgcgtattagccgtgaattccaactcactaccgctgttgagaatgaatttgatagccgggggagcagaatgtaccagaatctgaaccgtaccggtgggacaaggggcctttttgagattgcgcttgacccgtgtgtggggggaaatccacttaatgagctcgctgaccacactgtggtccaaatccacatgcacggccgagttgtcgctctcgcgcatcaaatcctggccgtgtacgcacggagagctaaactccatgttaaagtcgggcgcgcacatgtgtatttttgcggacaggtcagagatgtcttgcacatagaacttggttaagtccttgctcgaggtcaggtacatgaaattgcccaacataggagtggagttgttgatggttttggcttgaaacgacttgtcagtaatgtacaggcaggagctgttgaacgtgatttttgaaacaaactgattgcgcacggtttgcagaaccaacgcgggtgtgggcaagaaagtgacggtggtattctctttgagggtgcggatgaccgagcggagctgctgaatggccgacttatagggcttgagccgcaaagccagcgtcggaggctcgggtaaacgcgctttcctctccatatctgttaaccgcacgggaacccgcagccttgcaagatactcactgctagctcccagatgcgtcctcgtccgtgcccaacagtcaaataagctgaaaggcgttaaataattgacttttatagaggacacacggcaacacaaaaagcgcacgctgaaagtagagccacagtcgcacacagcgaggttgtatcacgtttaatacagctctgcgaatctcgagaccagcattacaagtcccatctaggaggcacaatacttatatactccaaccttacaccgcaagtggtaccatttcaacattctcttcattaaaagatctggagtcattgaagactcgtaatagaaaggcagggggacacactgatccacaaacatactgacattaacactggccatttccacgtctgcctgcagttcagccgcccgctgaaagacacagctgggcacgtctgcgcgctgaacggtgccctgagttatgcttttggccttgacctcatcgtgatgctcaatccaagcgtaattaatgatgggaactttcaggtgcttctgcatcacagttgggaaataacattcatcgctgggggggctgacaggcaacacggtctcttcgtcgacgatgcgatcccgggcggcccagatagatggcgttacattccacaggaaagccgtctcctcatcggcggcgatggacaacaactgagcgttacgcaccccgtactcctgcatctcagttcggagagtctcccattgcgctaccgggagcgacaggtgaggcttgcgatacagttcaaatatgaacttgccctccttgtaaatggtgcgatcaaaccactcacatggcggcagtccagatttacacaagtctacgctggtgcgcaacgccgcataatacatgttttcaaaaattctctcaatgaggtcccatgacgcaaagtatgtaaagcccaacctcattaacaccgtgtgcagtcccgtaaccccgatattcaggctccgcattttacatatagccgattccaagggccagtcaccggaacgaattaaggcgtctaggcgggcgttaccccaaacaaccgcctcggtgaccagggtgcgaagcacctgcatatcaaagtaacgtctcgtgttccccaaaaccacattgtcccgacacagcacgtcatcgtcggtgcgcgtgaacaaacaccgtgtaaggttgattgacagccgctgtaaaggcaggtcagattctccaaaatggcacgatgccatgtctggacccaaacatggtggcaagggcatattgcccgtcaatacagaatacttaacaatgtgatgcacaaacaccagggcacactttcccttcaaagcgcaaaacaacatgttgcgcatgaactcgctagccttcaccgtgactttcggtaccgtcgtctcatatcgaacatattctttttcaaatgcaaactcattgccacactctgataatttacgagacacggtgcgcccaaacaaggagtaatggctatcctgagcgcgatagcgtttcattagtacagaggggatattgaaagcataatgtatcccaataatgtccgtctcttttaacacaaagttcagaactcggatagccgccacgtcccacagatccacaaagatgcgcactatgggccgatgaacctccttttcgcggatcatgtcacaaaatccaccaatgcatcgaatgacactgatggcttccacgttgaatcgggtgacattaattgacagcgacactccccgagttaagttctcatacagccacttgtgtagagccaaccagtctacctcacgagaatacaaatcacatgaaatgaggtagtcatactggggtagctccacaaatccaatattggacatggaaaatggagtcaatgataactgtccatcacgacaccgcttcactacactctccagaacctcacattcgtgcctacagtccatgtgaaaacgatacactcgagcacacgggctgctgactatggccaacgtgattgccatagagatcctgagaaaaattccccccaaagattcatcctggccgtagatttgccgagaaaccttatctgtcaacacaatggcgccataaaatccccaacagccggccaggtctagatatcgagtgatatctgccaggattttaggtaggtcttcggaatggcgcatcacaaaatcgcgtagcggcccctcgcacatagatgaggtatagttcagggcatttcggctttcccgtaaccaattgaccttgagataaaaacggccgatgagaaggtcagaacggggaatttgtctaatgagtgcgggaccgtatctcataagcatctggaaaagacgatatgcgcctctgatcccggactgtcgagaagccgaatcgatatcgcgccacaaggtagcacgatcctctacatgtttcacgggatccggcactccacaaaagcgaaatttgccccaacgaccgtggcaatggcactttttgcccataagtagctgcacagtgttcatggccggcatgtgttgcaccagggaagacgatgcatctggcctgcatgatgtggcggtaccctgatcggcgagcgaccaacatgcatgaacaccgacttgaggttgttgttgctgctgctgtgcttgttgctgttctgcgtcaggcgacgatgtagccacttccatggcctccacaccattctcctccgtaccaccatcaccaccctcggatccctcctgcatgaccgcctcgagcccgccggcgccggtgttcctcaaagacgcctgagccataacaacattcacccgctactagacaaactctgtgaactcggagagttctacgttgaagtgttccaaacgcaccgtggataatttaacctcttggtgggttaaaacggaggtgtgaatgtcatcagcaagacaccaccccagtttttgaatgaccccagtacataaagaaatttgtcgtggcctggtgattcttttatttacaaaactgcaccgctccgcaatgaatttatggcgcaccaagtccgttaaggtgtgccgattagatatactcgacgtggccacataaatcgccaccttagtttccaaaacctcgtagtcgtacaccatgattaaatacacattttgcagtcttccctgagtttcctccaaagtcatatacatgtccttcggaatccataacgaaaagatctctgtctttagcgtgttataaaggtatccgctgagcacgcaagtgagtaacgacgtaatgcccaatgacactgactttacacagccaatggtgcgcaggcgacgatgcagaactttactgcccacgtccaaccaggccaaagcggcctttgcaggtcccgaagtatagattccctccagctgacacttggtagccatagacacgttggtagctttgatggccatgagatagaggctaatgtagaggtagcgcggcgattcagcacccgtctccatgcgaaacatgagagaaccgggatgaacctcgaattccacgagtccttcgggcacgaaaaagcgagacgtgatggcctgatgatcagcctcgtacaggtaacgcaccgctagtgtatttacttcccgcttcagcttgacagcaagaacgagttcgttatcttcgtcatttggatcccgcggtcgcttggcgatctcccgcgcgtccatgatgcgaaaacgcacagtcgactttcaggtgatcctcaatgagctaaaacagaaatcaacggaggttcaggccgtgttaaataccttaagccaaatagagatcggcgcactggatgtggagacagtgaatgcaactaaaatacaacagtttctgcagcttataccgcaagaaggataccatttcacgtttattcagcaaaatgtggtttactacatactgagtcacagcacgttgcaaacgtcccgtgattccctcagctccgctcaagaattactcaaagaattgcagaaacatcatcaacgccatgccataaccagtccgtgcgaatacctaaacaaccaaactacgctcacccacctgcaaacttttatggataaaatgcaagatcttcaaaagctctttgataccaatcaatttctagcagccaccgtcccagaccgcaaaaatcaaaaaccacgagatatcagtgataacggaacccaatatctcatacgaagcgtgtttacacagattgaagaagccacagaacatatacgacccttcagtaactgccgcctagtggcagaacttatagacatgctttatcacaacacactacgatgggccatgggactcatgcaataccacgcttttatagaaaagcacgatcaggaattagataccattctgaaaatgcattttttctacaaatactacaaagctgtcaacagcgagctaaacaccgaattccaaacattcatcactagcgacaagcgaaatctcggacccttcatggtgtctgatgcagatggagatcagcaaattggagcagaacacattagagatctaagcttcaaggtattcaacgccaacctaaatgaccgcgacacaacaggactggcattccccatactgctaaccacattatcggttctgaaccacatggcggtacttaatctattctatcatccaggattagtttttaggcttcttagcgaagagtcaacaccaagtgctagtgaaatgcaacgtctagatctcatagcacaaatgtgtagtcaggttagcaacgagttttttcgcacaattactaaaaaacccgtaaaactccgagacctaatgacacgcatacgaaaattcacatccttgggattgaaccgccaaacctccagaacgtacgcccaaatggcactgcttcaacctagccgaacgacacctaaaaaaggcagcgagatgtggttcgaaattcgacaacaacttatcgttgcgatttacaatacatatgtattttttatgtgtctgtgggtttatagcccaacgtttctcttcatccatcgacgaaagatcattctcgaacaacaaagatccacactcataggatcgcgccgcgaacttcaatttatctgggacaacgtaactaacaacattcaacacgatttttatgtaatgttcactgaagacgaattcaacgttactaccaaaggggccacggagctggaaaaagattacctttatcgcgatctactgaacaagtggggtgacattctcttcgtaatgaaacctaaactcacgcccgacgctcaatccccttcactagataacgtaaccaccgcagacgtaattaaacgttgcgccatgattaatctatccgaagttaatgtaccttacgagaccctgctacctctcactcatcaccccagcttccttgacacatttgttaatttagttatcgtgcctgaattctcgcaaattcttgcagtccctcataaccagtttctcactatgggatctccccgtttgttacgtttaactcaagcctgccgccttttggtaccagaccagattgcattgtataataaattagtttccctttataacttgactaccttcatttcagagattgacgccggagtatttcgtaccatttataatctaacactggaaattgccgctttattggaaaacctttgcggcgaaccagtgagtccagaactggatctactggtcgaactcatggcacaatcgctgtcacataatttacaaaccacggtgaaccccctcatcgaagaagtgatccaaaacaacagcaccagcgtcgccaaatatctagaacacactaatttatgttactcatttgcacataccataggccaactctctgcagacatgagtactgtcgagctcactcttcagtccaaaacacttgcaaaactcagcatcactcaatttctaaaaatggtacaagccctcatccagaaagatcaacaactgtccgacagctttcacaggatccacgatcgactacagcagattaaacagcggatgaaacaaattacagaagatgttatccaattgaatgagtattcaaagaatcaccccctggcggtcgacgttgtaaagtgcctacgaaaggccgcacggcagctgaaaagtttggaggagcggttgattttaattatggaacagactcaaaaatcgaacagactcatcattggctctctgaaacgcatcgagaaaacctgtatggtgctgagtagcaagaatatcgaggaacacggcatacgatactgtatcgcggaatctcggggcctgttgcgcacgcatcggtccgtatccgccatacccgcttcggccgtggattacctgccagacaacgccgagtcgcagttacgcacctttctgaaggggttccgagaagccggcgtggaacacagtccgcttcagatgagcggcaacacggatatccaacaacaaatccccatccccgaagtcttgacaaaccgttatgaaccatccaaccaaacaaatgacctattaaactggtatattacgtcaaaagatcaggcggaaaacgacatcttgacttcaatctacccagaggcccggcatgagtaattacccaacgagtgtgaatcatgaaaatctatccagcgcgcttcgatcaaacccacagccgattcgggccacgggcggggagccaatgtgtttccaactgttttatgtatctacacgccctacatctgcacggtgcacacacgacgctcagtaaggataccttggacttgatattgacagagggcgctcagctggacagcttggtggaaaccatcttacagcaaaagcgcccgggtgagaaactccctgtcttccgtttaggtgaagagattcccaacatcatcaccagcagctttggaaagaccgcccatgctctctcacgaccgttcaacgggaccgcggagacccgggacctcgatggctacacttgcctcggcattttcgactttctcatgtacgcgtatcaaaagaccaggcccgtgtacatcctagtgactgtgaacgctctagcccgcgcggtgattcttctcgatcacgacattttcgtgtttgaccctcacgcatctgaacggtctcgctatgccgcggtgtaccagtgcgactccctctatgatgtggtcatgctcctcacctacttcggcgcgcgcctgggagatttttattatgacgcattgtttgtgtacatgcttgacttatccatccacccggtaccagaagcggacattaacggcgtcattatttcgtcgtttcgagacccagacatcgcgttgcctgcatccagcgcaccaccaggatctcctgttcagacaatcccaagtctaccgcctccagaatccacacccaagaaaacacccgagaaaagaaaatccacctccagcgcctcccacggcggcaaaaagaaggccgctgagttcaaagacccaggttcctcctcgtctcgtgtgtctacgaccgccccttataattgtttagaagccttacccgccctgacccgctacgaacgcttgattaaacaagccgagaaggaaatccaaaacatcactatcaaggccccaccaaccgctggatggatattgttttctagttctggaatgccgtttgacgaagcgttccttacagaccggatggaacaacttgtcatgtcaagcatcgaacacgcctcttgtctccacacccgatggcgtccgacaactcctatgtatcaacaagtgcgacaacttagaggattttcagagagtattgatcgattcttgactctttggctgcaaaacgacctccacttactggacatgtacgaagccctcaaaaatgttaatacgtcgtctctaaccgtgttacagagagccatgctagacaagctgcgcgccgtgttcgcgcaatacagctccagccaaggtccaaaagtggtccagtgggttaaggatattctaaaggctacagagaaagtcaactatactcaccttccaattcggttaatggaatatgttgaagaacacccgctcgacatcgacgaaaccttcgtgtgtctgaagcaacaagatttttcgacaattgtgaacgccgtcaacagtcgccgacagatcaccactcagcagcaagaacaggtccagcaggcgctgcaaaaactgtcagccgctatctacggaatagatagtcgttatctggacagagtttcgttcgacgacaaggaaacaaaagacactctatcgaaactcgataatcaatcacgcacaacgttattgcaaaggggcaacaccaagatgaatgagctgaaagacgatctaaagcgtcaaatcagcgacctgttggagcgcaagcacaaccagattatcagcggcacgttgcctgtacaagacatgcaagctctgcagcggcgactggaacaagctgtaaacttggcacaagaaatgtcggagctacgtctctgcgatgtgaactttacgatacctttcagagagctttccaatcaactggattacctaatcacgggacaagcgtcctcgtcgaacgctatgtccttctccgatgagctgatgcagctacgatcgcaatttacctacgccacccagactaaagaagataccgaaagtaaaattcatgacctgatggttcacatagaagataccgtacaaaacctcacgagccgcagctccaacatcaccatgtccatgatccaggaacaactcagcgagctacagcaactcggaggcggcaacatgccggacatagcaaaacgtctggaaaaggtgcagaagacattacatgggctgtatcaagaagaacaagcgaccagaatttttgtccatggcctgaaatacgaaaacttaccgaacgatcagacgatgaagcgatacacccgtctctcggagttactacgcgacgatgacaacttgcacgaagtgttcattgagaagatcctggacattttcaacaccatactggagcggttatttgacaagacgttccctaaagcacaagcatttgacatgatcaacgcactcattaatcagattccccatgcatctaccataattaaagatctccataccgctaatgcggcaatcagccaactttccaaacagctagaggccctaaacaaagtccctccggacaaacgcctaaacgcactcaccgagctcgttcagtactttgtctcgaacggcaaagtttttagtcacctcatgagcatgcaagtaggcaaaaacaccctgccaacactgtacgaaaatttgaagatggaactggaagacaagcataaacaacaagccgaaaacaagtggctgcaagatgcaaaaaaactgaccgtgacgtcagccgaaatggttcaccaattcatgcaaacggcccccagcgccacggccgccgagctagcccgacccgaactgagcgccaaactgcagacgttcctagaacaggaagcgaagaaacaagaagaagaacgcaaaactgttttcaaagaacgacaggggatggtgacctctgaactcgctcgtataaccgacgcgatcaaggcccaaaccctatcggtcatacccagcctgaaactggaaagtcttcaagacgtgatcgcctccttgggctcgggagcccgagacatcttagagaagtttgatcgcagtctgctagctacactttccaatctggtgaaactgatggacgaacgcgtctccttatgtatccaagacgtcttaacaggtcaggatacgcactatcaacaatatcaggaagacgccagggcaatgcgccaaggactgacgtacatagggactttgatgaggaaccagctgtctcaagaaaccctaagaacattatcaaatctggttctacaatccatgtttgtggaaaagtgccaactgcgcgatgctatgacggtgttttctaacagcgactatctcgaagactaccaacgctaccgggccggacagcggcagctggaaatgcagatccaagaagccaggatggagttgcaccgtcaggccaccacggcagagcgagcgctgcaccaacctaacgcgcgcgttgatgccaagaacctaacggttggcaaagacttggcagagaagttggacctcgaatccgcgggccctttccagcgatccgtgtttgccactgtgctgactcagcaactggaaacgcacaaaaaaactctgaaggacgaaacggagcttatgaacactaagctcaagtctgaaaatgaattacggcaagccaagatgacgtccctatcggaacaatggagcgacttggtaacgcgccagaagatggacgctatggaggtcgccactccagacgccaaacatctgatcctaaaccccgtggccgccttaaccgagctcttggccaaagcctccacgcagatgtcgtatctggacgccgaaaagacgttcgcatgggccttgctgtttttacacgaagctaaaaaccaaattgaaaatcatcccggacacccttgttacgcgcaactccccaattttcccgttctcatccaacaagcccagggcagactggacacggtgcgcgttcacgtgaataacaacgcgtcatgcgaaaacttcgtagcgcaacatgaatctggaggcgcgattacggacagggaaaccattatgacggtagagactgtgtgggctaccctcgaacccaaacgcatcgctggaggagaagctcggtaccaaaaagtccaagaattgctgctccgtatgaaacaatcgctctcagatgtagaactgcaggacaccctagccacagaatactatcaactcttgagctctatccaaacgtttggctacagcctggactttaatatgcaattacaaaagattagagacttaaaagcacgttttaatgaattaatcaaacaacagcacctgaatacgtctgaggaagtgcctttccccatgcctccgattccagggaacgacattaccgtagcttcacctctgtctttcgcaaaaggtttagccgccctggaaagatatgtactggccgggtatcaatacctaacggagtgtatcaaccgccaaccgctcatctgtcagcgaatagatgacattccggctgtcttgccacctactgacatcgatcacaaaaaagcggcgttagaccgcttgaaacgtttgaactttagtaaaaagaatgacacgtactacgaagtaattgatgcgttcggcctccatcagctcatgtcacgaacaggcactcccttgcactacctgttaagctacggcaacgtgttgttcaagtatctggccctgcatcatgacgaaaaacacctagcaaaaaagtttgcccaagttaaaaatgtagtcacaggcagatacaaagtggtcactgtgactgtagccgtagctcaaaccattaaatctttctggacccagatctcccaatatgacctaaaacccctgttatcgggccagccgttactgggtttaggagaaacaaacagtcttgtgaatttgaaaatttttatttacatcgttgtttcagcgtggaacttgcaactcgacgtgtcccaggatatcagcggaccagtcattcgaattcccattcaggacctctgcatcaccatcaccaccttttatccagaatacatctatggcattgtaaaacaccccatccagaacactctatcctcccttgtgcgtgctctaaagaaggatatcgttcaggaggccattaacaatgtggtccaaatgccgccagcgtataacgctgacgaaatcaaaggattttgcgtgaatcccaaaatttggtcatcggttaatttaagccgcgtcttgtgggaccacaacctggtacgacagatttgtgcggtgggcccccgcaaaaacggcaatggaaaactttggcagtatgcggtagctatccttatcttcccgcaagatctcttacaatgcctctggctagaattgcggcctaaatttgcggaagagtttgcgaccatgtttgacttcttccaaaccctgtttatgcttttcactcacgagtacgacatcgcccgtgagtctaacaccaacacacatctgaacactggagaacccattatgcagaccattagcatcagacacaaagaatacaccgagaaaagtttgttagacatttttattgagactgaaaccgccctggattacgcgttaggatcctgggtgttcggcgttccggtgtgctgcgccatccacgtagcagacatcctaggcggcaaccgattactgttggcacgtcatctagaatatacaaatcgcgatccagattttctccacgttcagagagctaaagatctgaatctgaattacctggtaagccaaacatggacaaacaccccgctggaacaatgttggttccaagctcaaattcaacgcattcgagaacacctcagaaccccattacaactcgattttattcccctgataatctacaacgcccatgacaggaccatccactctattctccgtcccccgaccaccgccgagcgagacgtgtctcgcattatggtagaaaatcccttccccaccgtacccttgatagacgtgcccgagtccgacttgatatcttttacccgtgttcccattaatacggactttctccgagaagacccgcctcccatatcccgtccccgaagtcaccgcagcaccgctagcggcgtcagcagaggcagtaaagccaaaccatctaagactacacaaggcggcgctacagcctcaaagttgccatcatcgtcgtcctcttctgaaagagctcgagtgcacactgtaggttcatccgtagacgtccccgaagtagtgtccgaaggcgaaacaacatcgggtgatgagacagagggagaagactttacccatttaccttcagaggaagaacagcaatcgctaccctccacacgaacctttgtggagccggtgttccgtcagagacctctgcaaaccatcgttcgcagggaagatgtgaccaccgtgtcccctagcgctgccagttctagttttaacaatccccccatcaccacactcacacagaatgttattagtgccattcaaatcttgtcatcggtacgcgtcgacctgagatcaatggcacgctcagtgaatgaaaccatcaaccgactacggttcctctatttattataaacaggcccaagtagaacgagaaggcacaaaaatcaaaaagaaaatagcaacatatacaaaaaccacggctaacgacgagttctggctaccgccaacatgcgcaacaggtccagtttgaacgcatatttgtctgtgaaatagctggacatccgaacgtatttagccagcatggtgttcgtcacggggtgttccatgctctcttgcggcaaatccagcacgttggtgcacacgtgccgccgcttgtcttcatctcttttcacggtgggaccggtgccgctcgagctagacatgactgccgtgacaggccgtctgtttcaccaaggtgcaaccccgacagagcgtggcgcagttctcgagctccaggcagctgtctcgatactctccggactggcagcgcgagcacaagagtccgtgcccgtgccacgtgagccgcagcaaccgtgggatgttgacggagcgcaccaccacggtggagtcgcacgtccgcgccgagcagggcaagataatgtcaaaagtcacgacgtgatcgtacaccgcacacgcggcgttgaggcccaacaccgccttccagccgacccgcaggcagcgatgcccataaatggtctcagacaccacctcgtaaacgcgttctttaatgacacgctgacttccgcaaagagagcagtgcacgagttcggcgttggtattgaaaatgacactcttttcctggcggtctctataatagaacatggagttcaagggaaagttctgctcacactgcagcttctctttgcccaggttgagacagtgtccgcattgacgacacaccacggcaatcagcgacctggagtctagatggcgctcacacttcaggcgacataagcaccagagcgggagttcgatgacgctgccaatcaagcctccacgcagcgccaccgccagtccgtgcatgacaatcttggtaggttctagcggtcgcggttgtttgtgagcgcgaacctcgtcgttgagccccagagctcgcagcggtaccaggtaccgcggacaggtgtcacagaaaaattgtatggcctgtcgagccataacgtatagtgggttgccgcaaggcacgggtccggcgtgacggcgcagcgccgccacgagcgcttccagctgcgccgagcgcgacttgcgatgccgcgcccactcattacgatggtacacagccaagtcggcgcggccgtcgaaccttttggcacgcaacagggaaagacagggagaactggtttggttgagcacaggaagccgcaggtccaccccgaacagaaagcgatgaaaatcccctaaggtagatgaggtcattccatccagcaaggcgctgagcttttcagcgggatactgttgcaaacgaatgtacacatagtccgcatcgtagcgttcgaaacgcaagaaagcgacagtcctcgaaacgccgtgaaaacaattcatgctgtacacgtaggccaggaacataaagtagggcttagtcatcaccatgcgctgaaagaacatggtgaccgcctctcgctccgcaggtgcacatgccagccattcgtgcataaagcgctggtagaagcgatccccgagctcgcggtttagaaatcgcttgtcggtgacaaagagttgcagggcgcaaatttgctcctcagtctgccaggcgccacggcctatgaccatctgcacatgaaaatgctcatcgtgcgcacacagaggagcaaaaagcctccagagcgcgcgatgaaagtcacgagacatatcggtatatgagaaatagcaggactcccatcaccactccgatggtgaggtagcgcaggtccacacgaaacgaggaggcccaccgcatgtgcgccagcgagcgcaccccttgcgccgcactgatacgcggctcctcctcttgcccgctgccacggccgccactacagcagctaggtcccgccgtcctgcagcgacatatgccatagaagccacctggcggaggcggaggaggtgtgggcggtggaaagggcggcggagcgatcgtcattcgcggcgagtgcagccgcttgcggctgttgctgtggtggtgtcgcaacgccgccagacgggatcgaatgacggctccgttggccgccgcctttttggcacagagttcctttagaagattctcgtattcggcctcgttctcgggtccgaaggcaatgagttcgatattgaagacagaaggagagttagacttgcgcaccacgcacttggtgagcaccccgtaggccgagggcttgatctcctcaatgtccttgagagtaacaatgagcgagtcgttgaccttgagcacgttgaactcgccgacgtgcctagacgagacgagtttcaacggcgctcgaacaaaacagcagagagacacggcacagccggtgtttttaaaaatgaagcacggcacgtgatctgtgcgactttcccaatagctcagcagatactcaacgcaataaaccgtatcggtctttaacatagcatcacacacagagtaattggggtttttgcagatgagccctgcgtcagtcacacgcaactcggtgggtcccagtttcaaaatccggcgcgtggccgaaacgagatcgtgatgaagccccttactgatttccatggcgcgcgcgtagtgtacatgcgttttatttacccgctgattcctcttttccctccaatatcccgttaatgtccatgagcttgttgacgatagccgttaatagtttcgtcttttcgttcagaatctgcgcatgattacaagaggaacactccccgtgcacgtacttgagaaacgccgcgtacttttggcccgcgttgatgaaatttaacctcgcgtccagtgagggcaacatcagttcatacacgcgcggcagcatcggctcgaaggaaacctccagctcgtcctctggatccagagtcccatcctcgtcatcgtcaggatcctccccgtgtaccgcccgcgccgagcgaaacgacgccatagatagagtgtgtgtccgatatagatagatcactagccctataaaaaacctttatcactcctctagcctctcttcaacatgaatcaccaccccacttcccgcaattacgcttacaccggctgggaattagatctgacacaaccgctcaacgaaattacgaatgaactgttatggcacgcgcaccctcgtcaagtacctgaagccgccgctgtagcagcagcaactgctgctgccgctaacgttgctgctggcacgtcgcaaactggatcgatcacagctggtagcggaggaggggaccgtgccagcaacaatccctttctcttcacccagtcccaatgtaccgaccagttgttcggcggcctcggcagcggccagttctgcgacctagactcggaactggccacttttgaattctccgacacagaacgactcaagaagttatgtaccccactaaatatcgacacacgatgcaacctttgcgccatcatcaccatctgcctgaagcaagaccccgatcaagcgtggttgctcgattacagtctactgtgctttaaatgcagttcggctccacgcaccgccctcagcctactgatcgtcatgtccgaactgacccatttgttgcgtcaacacttcccggacctgcacattgaccaactttttcgacaacacgtgttgacggtgtttgattttcatctgcactttttcatcaaccgctgtttcgagaagcagcttggtgatgcggtagaaaatgagaacataactttgagtcacgtggccgtggtgaaagccttagtcatgggcgacgagatggtaccgtacgccaaacaccgctgtttcagccaccacaagcaaaaaattgtagtaaaaatccccgaggccccaaaacaattgttgcaaacattcacagaacacagcacaccgactcccgaacgcttcacctatctattgttttacatgtgggcgggtaccggggtcatggcaaccacgggactttcggagctcacgcagagtaagcatcatttgctcgatagcgtagcggacgctgatgatccagagattaacaaagacgtcggccccatttacctctcccccgtccccgtgtttcaaacgaaaaaccagaccaacaccgtgtgtttgctgtgcgaactcatggcttgttcacactacgacaatctggtgctgcgcaacctgtacgaccgcatcaccctgtactgcgaaaacaacgtgaaaatggtagatcgaattcaactagcgctggcagacatgatgcgggagtgtgcggtgcccatgcattcccagttcgaggatatatcacgctacacccgtctcccaccccctgcaaactatctctccgaacaccccgtgcgcccagatcccatcgtttgtattattttgcgacaagcaggtgtgaccggcatctacaagcattttttctgcgatccgcagtgcgcaggcaatatccgcatcacccgcgaagaggttctgttcggaagactccatctggaacacttgactgaagtgaaactcgcgatttgtcacgacaattactatataagccagctgcccagacgcgtgtggctctacattaccatttttaaagcattccagattacaaaacggagctacaaatccaaaacccagctgtcagattttatgcgtgaattcacacagctcctggaagcttgcgaaataaaactagtagatccagcctttgtggtcgataaatatgtttaacggcgtgcgatccacagagcggcggtccgctctgcggtcgttgactcgcaagcggcggccgcgacgcggaagtcttctgtccccccctaatcagaaaccaacatcctcatcgccctcagaaatcgcaaccccccgaccacggctgacgctgcacgagttacacgacattttccaagaacaccccgacctcgaaataaagtacctgaacatgatgaaaatggccatcacgggcaaggaatccatttgcctgcccttcaactttcattcccaccggcaacacacgtgtttggacatttcgccctacggtaacgaacaaatctccaagattgcctgcacatcgtgtagcgaaaaccaagtattccccaccgcttcagacgctatggtcgcattcattaaccagacttcaaacattatgaagaatagaaatttttattatgggttctgtaaaagcagcgaactgctgcgaatgtctacgaaccagccggccattttccaaatctactacatcattcacgcctcgaaccacgatatcgttccgttcatgtctaccgaccgcgatcggctgcacatgcacatcattttcgagaaccccgacgtccacattccgtgcgaatgcgtgtcgcaaatgctgctggcggcgcgcgacgattaccacatcaccctcgacatcgtcaaaggccacgtggtcatcagcgtgctgtgccaaaccctgaccctcagcagcgtgaagatcgatgtgaccgttctgcaacgcaagatcgatgaaatggacatcccgaacgacgtcagcgagtctttcgagcgctacaaggacctcctgaacgaactctgccatgtcaacaatgctcgctcgccttaacgcaatatggcaggaaggagggctccagatagatgcgatgcggtaaaatgcctagcaaaaacttgtcctttcttagcgtctggggaggaaacacgggggagagaacattggttacagatttaatgacctgatcgaaatacttatcggcatgaatcggcaccccgtgctcgcgcacgtaggtgggatcctccgcgatctcgtaattgcgcaccccgctactgcgaccgtcaacaggcgctgtgagcacgtaaaacacacggtcacccaccaccggcagttcctccgagcgggccgctaatcgcttaatgaccgcgatgtgtggtaagttggattgcttgtacagcgaaacgtctttcgacaagacagaggagagaactagctcttcgactcgcgctcgagacgtataaagctcgtcccgagcctgggacaggcgctgtataacgcgcccaaatcccggaggcacgccctgcatcttgagctcgtctaaagtcaagcgcgagagctgaaccgccgcccgagaaacttccggatcatcaaaaaggagctggataatgtcacgtgtgacattcttaacgaattcgcacgacgttttccgcaccagatccactcccttcatgctgagctccgtctcccccactatcttaccgatatatcgttttttgcaaatcatcatgagggacccgaacactttttcgaactctaacttgatgggatccacaaagagacactgggtgatataatgagccaaactggggccgcgctcaatgagagctgcggccgtgacaccgcgatagcacacgaaaacgctatcggtgtctccatatatcaccttcactgctaccggatcccccgaataatcctccctattaaaaaaattgtgtaaaaagcacggctccgcaaaattttcttccacaaactgcgatgtgcgcattagcatatcgcgacctatgcgggtgatactggcggcaatgggtagacagggcatcatgccgttcaccacgccggtgaagccgtagaaagcgttgcaggtgaccttgagcgccagctgctccttatccagcagcatgcgcttcacgggatcgtgacagctcctcatggtctcgcgaaccgctcgccgctgcgaaacccattttgtcagcagctcggacagcacagagttgcgcacggtgttcttgacaaagcggtaagacagcccactctccagctccaccgtgagcacatcgctctccggcggagactcgcccccaggcgccacaaacgtggaataacagagattatgtgccatgataattgacggatacaggctggcaaagtcaaacaccaccacgggatcactgtaataccccacctcgggttcgaacaccgtggcaccttgataggaaacatcagtgggctctgaagaattgtctgcccccttgtgattgggcattataaaatcccgacaggcacactcatctagcagagacgtgtaaatgcggatctgctgtccatcaaaaataacacgacgcatagggattctcgccaaccgcgcgatggcccccgcctcgtagtgaaaattgatggtgttgaacaagtccttgacaagtacagcgtcctgaacacaatacttgcccacctgcgcccgtccctcgcacccagaaatgaatttgacgggaatatccttgtaagacatgtcttctttttgttgtttcagatacaactcggccatggtgttgagcttgtaattgggagaactagtcttggccatgcacacgggatacatgtcaatcaccacagtccccgagataaacactttagtggtggtggtagtgacgaacttcttaagaggagaatacatgctgaaacggccctgtgcaggcaacttgctgtacggacctggactcagcttgtacacaaactccagccgtgtcaaaatgtacttgaaatcaaaagagttgatgttgtatcccgtgacaaaacacggtgaatagcgctgaaaaaagatcagaaagcccaaaagcatttcatattcagagggaaattcgtagacatcaacccctgctaacggtgcacagctacctatggtgaacagatgcaatcccgaagtcccaaacaccgtgttctcctcgcacccagtcccccccgtgttatagcaaacacacgaaatctggatgacaatatcatccgtttgctcggccgcggggaatcccccactggcactcatacactcaatatcaaaggacagacagcgatagaccggccacgacgtatcgtcggacacagccataatatctgcgacgtcgcagtctatttcgaaatcacaagtggatgatttatgagtgcgccactcatagcggtgcacgcagcaccatccaaacgttgtcatcttcttatcgatgacaagccgcgtcaagggatccacacgaatctcgtagacggggatcccattttccaaaaggtactcgccgattttcttggccatgctccaattactgatcgacacccgaaacaaattgggtataggtgacgtcccgtaaccgtagatggacatcttttgcaccggggtaatcgtcagagcataggccatgcgaggttctgatactaagtctgagacactggccagaagatcccgaagcaggtcaccatctgcatattcacagtaaaaatagcttctctgcccaaacacattcacgcagatgctgtgcccttgttcagtagcaccaaaaaagcgcaaaacgttccccgatggtgtgatgtgatgacggtagcgaggagacaaacattcctgagtatcgtgagtcaaaaccccatcgacctgatcgtaagtgtgaaacttgagcggtcccatcaaacgcctagcgaatgcctcgatggatggcggtggcgcaggtaaaggacacggccaggccatgtcattttcaagtacatgtttaatgtcccgataaaacataattgccccacgcccagtcttatgtttaatgagccccgattgtccatcgtgcatcgccccgcgaggcacaatctccagaaacgtcttcgccacggagcgcttggcgaccagattcggaggttttcgagcaccactcaggtaaggattgaagaacatatttgcagcggctgtcaatcacacctcgtactcgttctgaatcttttggtagccccctcgccgtctgttgcgcaagcggtccaagaagccggcggattgaccgttcgatgcgaaatcttcgtcatccgcttctgcctttctgcgtttttcttgatccagtttttgcaaagccaaaagcatctgataggcctcctctaaactgaattccttggttgcggaggctgctttctcttttatgttttcatactggctttgttcatacgaaggcggagcttcctttaccgtggttggtggaacgacatacgggaaaaagtgctcgaagggcttctcgtacgcgcgcttttgccgcatgtagatcaagtaaataacacccagtaccgcaagcaaaaagagaatcacagtgaaagaaccgaagggattcttgatgaaaccgacgacaccttccacaaaagaagccacagcaccaccgacagctccgatggccacacccaaagccttccctgcagaacctagaccgctcatcatatcatccagaccacgaagatatccaggcactttgtcgaacacctttccttccacgtgaatcattctctgcttgtacgtattgaactctcgcatgatgtcttccaaatcaaacacattactagaccgtaattcgtcctcagagtacagttccaaagctttgaaatcggtgttttccagcggatcaatgtccagagaaatcatggtgtctacggtggaaatgctgtccagtggaatcattcttttgtacagatagtcaacatattcgtaagacgaattaccagcaatataaattttcaaactggggtattcacacgcctctgtacgatggcgtccaagcaaaatttcattatattcaccaagctggccatactggacatgagaactgtttttaaaagtgtacagcacaaccggccgagaatagcaaacaccacattcctttgtacgcatatcacgtagcactttgacactgttctgatccacctccacacactgagcaagactgataacatctccaacaaatcgagcggcaatcggtttatcgtaaatggcagacagcatagcactgggattgattttgctgagttctttgaacacttccaatgttctcttctgatctttacaccatgcttcagcgatttgcctgagagcacggttaatgtaatttctcaatgtatcataagtgtactgcaattgagcatacactatgctttttagaacttcttctgaggttttgttagagtccgatgcggaatcagtagaacgttttctacgagtactactgttggtattgttgtaagctacagccaattcctccatctcaagaatcgatttttcttttacaggtaaccaaaacacaatcaatccaccagtggtttcatacatagaaacatttccagattgtacatatgtctcgttataagatgtattaaaaattagttgtaactgctcattagctttatccttaatacattgaaaagaaggatcagactcatttagttcctcttttgaagttaaaaaggtggccgtcatactgctagatgtataatgataggtatcatcagcctccgatctaattgtgcgttctgattgttcccaaaacgtgtattcacaggtattattagcttcctcaacaatatcccacgacataagcacatctggccgttcaaaaaaacccacaagcggatgcgcaacttctggagcattgtctcttccatagtacgcaatcatagaatagttctttctgacggaaaatttgtcacggttttctccaaaatgcttattgttagatccattgtaaaaaggagaaatgtccacaactttaccatcagaagtcacaaaaaagtcataggggtacttagatctagctgtagttacggtcaccatgcaatttacattacaacttgtagtatacagccaggtactgccaggtttgtgccaaagttctttcacagtcacaaagcgggaactatgagtattggagaaatcatcctcaaccagaagcatagtttcattcacataactgtccctgtgataatttacataagtagcacctgccacattcctgaccacggaattgtaacatctattcaatttattaatgtaatgaacttcccacattggtacggctagatgctcttgactaaatcccaacaaatgattttctctgatgaaagaatagctctggcgaaatgtcaaaattttttgatacatatgcactttgaaagtgtatggccgaatatcacgtttgtaaaccaccataataccttcttcaaaatcttctttcgtaggtttgaaactatcacaattaatgttctgctcaaatcgaagaagatccgttccctgggccattgagcaaacacgatacggaaatttggacatatttatcttaaaaacctcatgagttctcaacgttgtattttcaattagaggtcccgtagtattttcagtaggcgaagtaggtgttacggcaccagatgcagtgccagtactgctagatgcaattgaaacatacacaaccaacacgctagcacagagaagcgggaaccaattcttgctcatcttgatcccgtaccaagtcaaacaaaacagaaacgtcccgaggccgtttcctggaagctcgcgctcgccgaggaatagtcgctggcacgctcacactgtctggctcgcgaaacacgttgttctgctcatccggcctggccagatgcctatagaggaggagatacaggtcctttgatttataaagtgtgccttcgtgacgcaaaattagaggccactctttgttatacgtcagaattaaatcgtgatcggtggcaaagtcgtcacgcaaacacgcaatcgtgagctgttttccaaaggtttcgttatatagtgcgaccgagagaacgagttctcggacatgtttccacatctccttttgcaacatattcaagtccccacaagaactgaaatcaaagaatccttgatacttgaccaccatccactcactaggatacacggtgccctccgcacattttaccaagtcatctttgatgtgaggtaatactccagcgttatcacaagcataagccatgtccacattatgagaaagggggtagcgatccgtacaatgtgtgaacaggggaccgttacacaattggtagatctgctgacctaacagaggaagggactccacagggagacttttgtgaattatgttgtttactacgtataaatgttcgtcatagctgagcacttgcgaaacgtccaccacatcggggttgtctctgtatcgagtgcggtaaatgaacccattcatgagtctggagataaagtccagacacacggtaccgatgaggttaacatcaattagcttgctggtcaatcgctcctgcgattttatgcagcggatgaccttggcgtagcccacctctgacactttttgcaagtacgcgcgcttgcgtatattaacctcccgagtgacgttgtgaatccgcgtgcgcgcgtccatgtagtccagaaactcgttgtcttcgtcgggagccccgccgttactggacgtactctgggggtcctgcccatgaatggccgcgcccaccccctctgccgccgccgccccatctggcacgggacgcctgatctcgtccaggaggcatttgattttggtatacatttcgttgctttcgtggagtttgttgaaaaccgggttgtcctcgaaagcttgaatgctgagggatgtaattaggtcgatgatcctgctgggggcggcaaagaccgaccccacgaaaagacgctgctcgcgggaaagcagcttttccccgagcacgaaaatgtcctccacgtcctccccgtacaggtacctgctgaggacgttcatgaggaccctgcacaggtggtgatagatatttagctgctgcatgcttatccccacccgcttgactataacctccgaggtacgggaccagtaggtaaaatccgacaaggaatatattcgtgccggtatatccgtaaacaggttgtactccctcagcgcctcctccgcctcctggatatagctgtggtagaccgaagaagaagagaacaggtttttgagggccgtgaggaccccagaaaggctggggatgcgctgcgtcagctccgtgagatcctgctccaccgtttgtatattcacatcgcactggctcgacggccggtggaccacaatatggttgcagagcaagccctgcaggcgcttgttcagcgagcgcccctggttggggatgatggtcagttcctcgtagcattgggcgcacgttgttccctccacgtacgcctcttggcaggctaccggtgacactccgcacaggcgacgcagcagctggaggagttgcgagcagacctccagcccgctctccggggacaggatcgcgtatacgtagttcatcttgcacaggaagcgctcgatgtcgttgagcgttgctagcgtgacgctgaactttacgttgtccgtgaacgtaagctccaccgtgtggtgccgatcgcaccgatctaagcgaaggactgtacggtagtactccgcccggtcctgcctcctggagtacgccttgagagcgcggtcgagcagctccgtatcctcgtacagagccttcaaaatcatctccatgtacaggctcaacagcgaagtctgtgtacggttctggcgcaccagctccgggtagatcctgcggtacagataggcgatagccagtgcgttcttcttgaacggacttgactccgccagtaacacgctcggatcgcagtactttagacactccagttccatggcgtattcgttgcatttggaacacactacgcacagtttctgcaacaaattcatctcccgcaccctgctcgtccgcgtaacagacggcgtcctccgttatctgctcggagagagacatagggacggcacacaaataactcgctcagtccacagtctgccggaacgacgacgttaatatataacggcgttcacggcgtttattacagacggcctctcttggccggcagtagaccacagtcgtcgtcaaaggcatgctctcccccgcccgcattcacacccaccgagttggctaccgcctccccgacagcaggggccgtaaacagcgcagacaggtcgtgtacctcacccccgccaccaggttccaggcgactgtctaacacctgctgaagattaggcagggaaaagtccgacacccccatctcccgcagccgggaaaacttctccatcagagagtctgccaccacctggcagccgtccacaaaaaataacacgtcgtcccgctcggggatctcctcccgagtactcagaatctcgtacatagccataagctcgggatcaacatccaggttgtcagagtccaaagccgccatgactctgttctttatgatgtcctcatcgaaaagtacgttctcgcgccgcgagcgcttgatgagaacatcggacagcttggtggccaaaatacagcgctgtcgcatgaatttgtaatcttgccctcccatagagttcgtgttgaggctccgctccaccccgttacccgaaaagtacccaatctgcccgaactgatagatgtccttattactgttgaccccagcgtacttctccaccgagaagctcacagtaatcagagatctctgttcaaagatggttcgcatcagagactctcgcgtgactgtggccgctaacggtgcgatgacgccggccgccttaagatccttcaggcgcagggcgaaatcagccggtgacgcgaaattgggtgtctcccccagcaaataaggaaattgggcgtgattttggtacgtgagtctggtagttaggccgtgtaaggtacctatgtagtccttaaagccatagaaacaaaggaacttgttgtgaaaccgatgctcgagatagttgagcatgcaatccggtgccacgtcaatgagatcgtgctcgttgtaatcggcggtgaccgaaatgacaaacttcacaaagttgttaaactcccccatgtccccgatactcacattcttgggcaatgcgttggcacagaccttttgccagaactgtaagcatgagaagccacaatcagggaacaacttatcgtgatacttgtacagcaggaagccgagacagcccttcaccgggttctttttgggcacatgctcacggcgaaaaaacacgtgagccgtggtacctttactggctttggagatgggcctattcttaactctgaacatgagaagggcaggcacagagagccgagagagcttaatctccatggggatgactgagtacgtcccacgggcatagagtttaaagtccggcaggcggtcgtgatccacattcttagaggatttcacgttcctaataaacaaaaaaccctttctagaggaagtggtggaaaaagccccgtgaatggactggaagtgttgtgtaacccaacgggaaaccagactcgtggtcaaggggttgtctacaatgtatgaggtagccgtgatgagagccacattttggatgatagccaaaatgacacggtaatactcataggacaggatggggttgaaagcaacggcatagggactgaggtcaaggttaaaagcctgcgtggccccggacacttcgtcacgactgcttttcatgcgaacctcagagacaaagctcatggcctcatcatctacaaacttgttgagcgatgaaaccaagttaataaagtcggccctgccgttgatagtcatggtatcctctcccgtcactgagtctatgagtctcattttcttacaatagtccagaatacggttaagtcgatgcgtgcggtccacgctcgaactggcactgcgattagacgtcggcgctgacccctcgtccgctttggtgtccaggttcgtctcctttgactccgcactgtaccgacgcccaaacgtacccagtgtgtccacatcgttcaaaaagcgagactgcataaccaccacacagggctcttttttaggcagcctaggaatttggggaaggcgggtttgaacccgtacaaaggcagtattgtaacacgtatggcaacatgtcccgccgcaagccccgcacagactagatgagcaaccgattaaatgattactcagagtggatgaacccgttaacccggtattgtaaacagaaactcgattgaggtaccaaactagagcggaaaagagttgggggcacgtaccgcagatgagggccaggtgatgaggcgcatagcgctcgtccttcacaaccgtaccggaagatttgataagtttcctagcatcgttgtaggtgtcctcacacaaccccgtgagcccgttggcaaaatgaatggacttgagcagcgcctcttgactggccccggtaccactagcatttttgttggatgtcaggtagactaacctattttgatagagaatagagttacagctgaatagtaacgcactaatgtgagttgagaggtgcagcttgagctccgtgagcgccttgatgagctcgcgatggtccgcggcgttcatcaccacgggccactcggagtacaccatagagtctgaagctccgtaggctgaatccagaaacaccgaagcgaaactgaaacccagctcacagatgaccgcatcacttagcataagttggtccttctccaaactgctgagcttctgactcgtgtacccaaagtatttcttgtgaggcgccagcttcaccgattgctgactatcgtgcacgaattgcttcaaagctgcttcaatgagtaccttggtttccgaaaaacgtagtgcctgacaccacgaagtgtaaacataatagaacagggcttcgctcacagcaggcacatacagaccccgagactccacaaaggaattacgtttatctagagacacctcatcagaatcggcatctgcctgcagagagccaaagagcgttggagggtacagcggtacacgtacggcgtcacagtcattgagtcgagttggtacagcctcctcgaaacacgggattaactgccccgcatagagaaattccttaaggccgttacccaccaccacgtgaactaccacttcttggggatcacaaccggccgccgtacacagcgccgccagatcggtgggcgctcggccctcctcaggcacgtaggtctccaaagagtatttctgccgtgtttcgtcacataatcgctgcacctccccgtgcggctccgaaaaatgtattatttctcgcgtgttatggaagtacatgacgaaagggcagaaggacgtcaccttagtaagcaccccaccgtcataacacacaaccggtgttcgcaccgaagtgcaaaaatcttgatccaccgtgagccccatcaagagcggcgcaatcaccactggcgtcgaacggtcgcacagcgacaacgtcgctaacacttcattcatctccgggttggtttttgtgaaatacaggtaggcggccggccccacgggagcaatagcgctaagttcctcgttgctcatggtggtcatgtaacggtctgcactcctaccaagtgaactttatactcaggaggacttaagacgtcacggttgacgcattacgtagaccaccagcacggaaatgtgcaccgtgcgcctggcgcgccgcccccttcgacggttattcgaccgcttttcgacccaaacagactccgcgccaccctccgccaggccggcgaactgttattgataggcgccttcgaaaatagcgtgatggttcgcggccatccatgcgccacctggtgtccgcgaaaaacaacgtgtatgcatcggcgcacaagcagctgtcaatcatcatgattgacagatttcagacaaaacggcgttttattttgaaaacgacgttccggacgctgttttgtaagtaaagcaccgttgtgttcggtcgggcatctaaaaagcacgcgcgacagtttatgaatgtataacagcgtgaataaactcactccctcgcaacggtgttttgtgtgttctgttctggtttccacggcgtttacagtcacattccgcggcgcgcaccccagaatcaccgtcgaatctgcgcccgacggcacggtttatccgcgtgcgcatgtgtagtaaaaacagcgtggttggaatcaaccgaaagctgcgatcgacacgctgaaagtggctgtcgaaacggcgtttgtgtcacgtgatagcaaaaaacaacgtctcgcgcgcgcgttatgaataatgataatcagctatgatgcttacatttgaatatgtattagggggtgggctcgtaggtaccgtatatgcgcatgtagctgtactgatatgacggcatcatacagctgtatctaatcaagctgggtatatacggtaaatctgataacgggaaatacggtaaggctcattagaatgcgataccttataaggcttaattaatatccggtaattatattcgtatgtaaacatatgctaattaatattcggatatacggaataattacgtatactttccccgcccagtttcataagctttcaggtatcgggggtcaaaaagggggcgtatccggtagtagaaaatacacacccccttgatttacatgcatggtcacacccacattcaatatggcgatttgatgccacacacccttttatgatgacgtaggcacctacgtcatcgggaaaggttatgatctcagacctagtcaatgcagacgtttcatcgacagtgcatatataaaagataaaagattaaaaacctaataacgataatctagaacccctcaccccccaaacccccctctccccagtgtgggggggatccggttttgtgcgcatgtgcacaccgttttctgaagtcgtgtgaggcgggttccggaagatgggcaccgcacagtgcgcatgcggtgcccttacttcaatatagttaaatgggacgttgttttcgatgcccagcccccactctttgggttttcgtgggtctggggtccctttttccatcccccattgtaaggacccctgacccaattctagaagcggtctgcatgcccagcccccacctcgcatgctgtgctgtgggagtgcccctccccccaacggtctgggttatcggggctgcattggttccctatgatgggtgcccttcccccatcgctttcccagcatgcatcgctttacgttttgcaaaacgctcagaaaaacgctgacgctgcggtttttacaggaaaggggcggagtcagaactttccagaacttccgatttcgtctttaaaagccggcctgcccggagctcggtggcgcagtccgcggcgccgtccgggcaatcgccagtggcgacctgggcatagccgtggcttgcacactgcgcccacccccccgcccaccggggcctcgcagcctcggtgggggggcggagccggttcaaaagtagacctcgctcccccttcccccaccccttccccctacctcccccctggccgcctgggggatggggcggcgttccgctggcgctaccccctccccccggcataccctcccctgctcccctggtcggggggatgggacggcgtcctgcatgcgccgccccctccccctcgacaaccccaccccgccgcgggctggatcctgcggtatggggctcctgggccgcgcgcccccgcccttctgggcggccctctgggggcgtagccatgcgcgttctccagggagcggccgcgcagccctggcggggggcggagcgtgcgctcggctgggcggcacggaagcctggctgcgaccagggaaccgcgcccctgcaccccagctgggcctcgcgacgcccccacctgcgagctgtgcggtccccgggttggccgggtatgctccctgcggtgcgcggacggccgcgctgggtctgccgcggttccggctccacgtcgtccgggccgccctagcgctccgacgtcgggtaggcagccggcttgccccgacgagccctggacgcagtgctggatcgggacaggcggctgcactacacgacctggatgccgccgaaaacccccccgttcccggatgccggctccagcgatcgccgaagcgattgcggttcgcagccgcccgggacgaggaggccaccagcgccatagctactgccgtttctgctgctactgcttcagcagcagctgctcctgctaccacaatcgccgtcgttctcagcgctgctactgccaccaccgtggacgttggacggcgtttcggatttcgtccgtggtggcggccgatgtcgccgtcgcatagccggcggcctggaggcgacctggatgcgggtcgcggctccaggttagacgtcggtttagattttaaatcgcgtttcgggtgtcatatattttgtattgtgtaaaagcggaacctaagcgaaactgaagcaaaagtaacaaaagcaacaaaaccagcgccgttgttttccgttctacgttcgggacactaattaattatgattgactgcactgatttattggactcgtataaactgtttacactacacatctaggatagaagctttattaaaaacacgtcagagatctagcttacatcagaacgcgtacctacattatttgttcgacgattctgtcggactgtttgtctgtcctccatttggccggattgaatcggctccttatgaaagcgaaataataaaaaaacagacttgtagtttgtaaccgcccaaaaaagaaaaagaactggaactgtttaacgatatatttgtagcaatgtgtctgcaccagtgaaatgtctacgaacctttaaaagccctttcacaggaaggccggcttctcgggatgccaggagtgtctctctatattgtcttggtcctgggtgccagtctatttagcaaaaaacattcacttcatctagagaaaacatcacgactcaataattaaatgataaaagaaaataaagctaaacaaaagaattaataaaaagccgcgggtccgagcccgcacgtccatcatacagatattactacgatatgttagtttgctcgttgttcttgtgtattcttcgttagatcactgccacagccgtcgacgatcggtcgcggtgcgctctctcttgggcgtgaatcaggcgctaggttgcagacgccgtgtgtgactgtgggcgggccaacctagcgcctctttcacggcgcggagaaagagaaaaacgactatagctctctaccgcaatgatgcaatccccactagcatgtgctttaactgtgtgaacaaatcgtctgtcttacaaaaatatcgggccaaagccagtgagtatttttgatctttgtatacaagacatgatagtattttgtttctaaaatccgcatcgtcatggccaccaatcatgataatagcaatctatgataattgtacaaccaaccagtcgtctcgccatcgtgttgcccttttgtgcgatggcagcgctgcttcttagatgacatgttgaaatataagtgtgttgttgcctgtgttgtttccgccttttctctaaatggtcttggattatgtgcctcatctgccattcgagatcttcgaaacatttgagtcatttgtgtagtcattttcctgaatactatatttactcagatatattcaagtgtaagttcatcttcatccttgtgttatcgacctatttgtttagaagtgtgctgtgaaagaaactcactcgactctcgccccctgcctctctttccccccatgtgcgcagtcacctattttaacctgtcactcacacaacactcagtttctcactcatccagaatagcagtaacaagacaaaataaaaaccaagctcgttcacattccaatagtcgtctctgacgtctttttattctcgggctcacatacaagatacaacagcgccacttgcagcgacgctcctacaaatatccctcttcatcgtcgtcatcatcatcctcttcatcgctataacacatgtcctcgtactctggtgtctggcagcgcaacgcggccgagtctgcaaacagttcaatggccgttgtcgtcgctgctggcgccatctgtggttgttgatgctgctgcgcccccgaagggcaaggggaagaggagtcagacagagtgctcagggcggagatggccgcgacccagtcgggctctcctgagggttcaatgtgagcacacatcatgctgtcggcgccaccggtgtcaatcaccggagagttggtcgaaaagggcgtgggccacacaacgggttgctgcggaggctgctgttgcggcatttcctgggatggtgcaaagttaatctcatgtccagcacacatcaccgcgggtgccgcaggagccatgtccgtactcgtaccgagaattgcctgctgctgtggttgcggcgaagcagcctggggtgcggcagtcacaacagcctgaagatttccataattctcactgttattctcgaaaactgttcggtcccggttgagcggagacacacccgaggcggggcgaggaggggtggcggtatgggtagttgccacaacaacagggttgggaacaacgggttcctggtatgaggcaggagaaaaggcaacgactgccgtttcggtgtgctgcggtgtcgacactgccatcatcgaaggcatcggtgtatcctggggctcatcgtctttctgaaacaccgtgaggtcgaccaaacacttggtgtcaaacggacaataggccaacataaactggtaggcctgcagcgctttttgaatgcgcagttcacagagttcattctgacactggtgttggtgcagggcgttcaggatcagttcagccaccataccgcagcggtaggaacttatggcgccgttgtcgtcgtactgatccagaaagtgcggtgtgttctgaatctgtctgcttcgccgtcgcagcgccaggatggctcttgaaaaagaacacacatacgccaaggcgcggtggatggggttctcaaacacctcgggcggccgtttctggagctccagagcggtgtcgcgcgtgcactcgtcaatcatctggttgggtttcctgaccaaattcttgagcgtctggcagttgtccgaccattcttggccgttatccaggatgcaggccaagtccaggttgttgagtttgttaaacatgagctgccgcagcccggctacggtggccatgtacgggtcgtacgggttgacaggcaggccgtgtacaaagtggtatttcatgtagctcaaagtttcgtccaccatggccagcagcgcgtgcatgctgggagcgttgaagatggagaaggatttctcaatcaccagacggcgtagcagggacgcgggcaaccagtcaaactgctggcggatgtttagcagataatcagtgctcatgagttcctcgtgcgacatcagtagacgtcccggctgctccttgtcctgtgggaaagccgtgggttttttgagatcatcagggtagggagtaagatgcaagctctcggccgtgtacctttgcaagtcgtacactggcgaggtggtagagctgggttgcgaggcgtcgtctcctcttacctcgctgcccttcagtctctggcgctcctctttctttttctcaatcattcggctcagctgacgcagctggttctcgtccatgctatcaagctcctgattgatgagcgccagcatgtgtcggttgctgctcgtggccggcgacacggtcaccgcctcctcgccgctgtgacggtgtttctgatgatgatgctgccgaatgtaagcgcccctggagttactggaggcgggatgctggcggtggtgggagtggtggtgatgatggtgtcgcatcaccaccgtggtctgaggtcggcgtcccgagtctgggccgggcggtggggattcgggcgagtcgcgcaccggcggcgagttctgctgcggttgatgatggtgcggcgtgcacgccgcctcgtacctggatcgcttgatcgggggcgtgtgctcgctttcgtggtccaggcagaagcgccgtgcccgctgagcacggcgttctcggtcgctgagctgcgagagcgcgggcccaccgcggtatctcttgtgcagatccatgtcttgccagggatgactggcaacgtggtgtctgctcggggtttccgccacggtgtatatatgcgaaggagccggggccctgtgacgtgtgccttcggggtgcgtggctactggtcgttcgtgggcggtctgagtttcacggaaatgtgcacgttcttcgcgttcgaatgacattttttggtaaaacagcggctccaaaggctggcccacagcgcgtaactatgttcggtgcgtaggtcgatgaacacctgcacagtttcctgcgggttgcggtgggtatagttcaggcagcggaagtctttggtgcgtgagccttccagccgcttgacggaaacgcagtgggggctatggggcttgaatgttagcgtatgtggcgggacgaactgctcgctcaccttgggctcgtagtgttgagtcagattttccagtagcaagggccacacgcgcgtcactactagcctctggaggtcgttaaggtcacttgcaggatcggagtcggggcgtccagatacctcgccacgtaaatggtatccgatcacgtcagacagggtgcgcttttcgtaacgcgtcacatttactgaccgcgtttccataaagttaatatctggggaaggacacaacttgtcacgcacaccgagtataatgcgggtgcatgagaacgacatggaggggtggtcgtcaggggacaaagaggaggaagaagaatacgatactggtggtctcggtgaccccggtggataatgcggtgcgtgatggtgcaacaggttgcgaatgtctagctgagcacgcacgaatcccaagggatgttccctaaacccctcaggtacgataaaaatcgggaggagacggcggtacatgaagtaaccgtcctcctgatccatcttgtacataaacggcaggcggaccgagcgtccgtggtgataaatgcccgtatctaaactactttcagggtgagaaatcggatctaggtgctgatgtagcaaggtatctaggcatatggcatggttcagcacctgtgcaatggacctcaacaccgagggtcgaataactaaagtgcgctccggaaagggacaaatgatacgaagccccaacttctctgaacatttacaataatctgttcgggtttcgtaggaaggtggcgggttatcgtcgtcatagaagtcaggggtgaggtttttgcaggcacttttgaaaaagtacactgggtgatagtcgggattcatgttgccgaacagactttgccagaccgttacccacacacgacggaggccgcggcagatttcaaaaagaacctctttagataatccagtcaccccatcccgtagtcgcagatcaaaatctgcaataaagttatatgtaggcaggcgttcgttaaaaatttcatgtcgcgtgtagtaaaattgagtctcggcattagagctagccacatcatcgtcatggagccagatcatgtccgtcagggcttcgtcagtgaactccgtgtcggggacgtgtttcaggagatcgctaggaaacaggttctggtgccagttttcgcacgtaatggcacaaaatacatgatgatcattgggcaattgcacacgaaacagggggatgggaccgtcaaaacgagtttctttgggtatcagaaattggcgttgcgagtactgggcgagggagccggtggcgtaggtgttggcggttttcagggacgcgcacagacgtagcagtccggacagggatctttctagtacagggaacacggagtcggacatgctattgatagtgtccaatttgcgcatcacttgggacgaagtgccaaaaaatcctgtgagagcgggtccggtggtctggtggctgtagcccgagagtcggagatcgtagttatcggtagatagaatgcgtgtttcgatgtagtcctgcaagaagttgggcagggagaagtacttgtccatgacgctcaataaatcatccgcgagatggcggcccaggaacaatggtttttgtctgcattgttcttcgcgcgcgccctcgtcgtaagccaccacttcgcggtatttaatcaggcgggacctggaaagtgcagttctgtaggacagatagatgtaatgcacgcagaccgtgtcgggtaggcgggcctgttcgcgaaaggtgttaatctgcctgtcaacgtgcaccagctcttcgtagtctcgctggttgcgcgccatggcgtattgcacgaattgcgggatgcgggagcgaaagggggatccgagcagcatgcgggtgaattcggtcatggtggcgtgagtgggaatgatcacgcccagatctctggagaagctgcgtacgtattcctcgacggtgggaatggtgctgtactggcgctccagcagatagtaggacatggtcaatagcacttgcccttcggtgtgcccgaaaacgctgatgaaccatgatggggaagtgggacagagaaagatgaggttcaggtagcgcacgatggccgagtggtggaaatagaccaggtgtttgaattcgcgcacctcgccgccgtgttcgggcgagatgacagtacgaaataggtggttgtagatgggtttggtctcctcctcattgagactgtctaccagagccgacagcgggatgggctggtgagtgtgcaggtagtgcgcgaggttcaggacgtcgttattgaccacgaacaccggcgccacgcgctgagagtcagtgcacttttgggtctgtaaacagaagtaaactaggttggaggcgtggtgttttaccagtaaggggaacacacagtgctcagacacagattttgaaagcacgttagcgactatatgagcagaatcatactctgtcgcgaacagaaccagcgtcattgtccgtgaaggatggacctggcgcggcgcctttggggttttctcagctgtcagcggcgggcttcggttggggcagactatgtgctgcctacggcccagcgaagatgtgaacatgcaggagatgcagtccttttttgaggagaactttgggacgctggggatcacacctgaggatttgaaggcgtttgctaatgatcaggaagtgacgaagcacttactcaagcttattcctctgtatcggcactgtcaggtcaagtgtcgaatgctgcaggactacctcgcggatagttgtcagccgcatacgcggcctgccgccgaagtagagaatcaaaaatcgcagcgtatcatgcaggctttggacgtgatgatcttaaagttggtggtgggcgagttctccatgtcggaggacgacactctggaggtgttgctcaataagttctctacagatcaggtggcactctgtgaggttcagaaggttatgggcctggtggacatggattgtgatcagagtacctcaattttggatgcggctgccgccaacgcagaaaactgttctgtggtagctgaaggcggcatcgatgaaaacgttttggcaatgattccgcacccgcctcaggaagaactgcctgttgtggaagaggtgtgtctccctacaccaatgcctcctcccccaaaacctaagcgaaaaaaatctactgcagtgcatatgtctgtttgattaacagatgtgaatatgtcgcaatataaataaaaacacgatgaacataattgtgcgtttgtgtcatttattcgttttcgcacgcaaggagttgttgtaggatgtggtgttcgggcatgtgggtgaatccggtgtctggggttggtggcactaagagttggccaatggggtggttatggactaaaagatacacgaaacggcgggtggtgaagacaactttagcgacagatgtagtgcctgatatatagacggctgaactggaggtattgaccagtgtgattgtggctacggttcccggtaaccaaatgacgggtcgaatgataattcccaattgattcatctgacgggtgcccactatgagggcgcaagtactaggcgcgtggataaaagcagcgtccagatacaccgtctgggtgtgacccggttgaattataatgcgttgatgtagacgtaggccaaaaaaatagttttcgttagggggcgatatgttcatgacttgccaaggttctggacagaaacaagggaaaatacagagatcaccctcgatggtgccaggcgtgatggcttggaacgtgtagttcaagttaatcacgtccatgctgagattctggaggccgggttcgatgagttccggcatgcagacgaattgagagtccaggcatttgtagaatgtgattccaaagtagccggtaggaatgtagagattgatgcccagtggagtggatgtattgggctgttcggagagccagataatgtgtttgttgtaaaaggccaattgcatatgctgctgtcgaacgatgaagctggaaggaatccatttataaggaacgtttctgcgtggggaatagatgttggattccggatgtcgaaacacattttggaagttgaggttgctagcgaacagtagacagtagcggagatttacgctgtgttcgtcttgcggctcttgacgttcgtcattctttattaaagatgctcttctccacaagcgttggaagcgggatttgtgttgtttcacgaggctcagttgttgatctagcctgtccgagagcacgttgagcattgtgctctgggatagcgtggcggagcagtcatgcatcgcaagacgttgatgagactgtttttatgggcgtgcttgattgtaatatgtgtggccaacaataatacatctacagcgtcaccgacgagtaaacctactactgtgacaaccttaaaacctataaggaagcatgcggaagatgatttttatactgcgcattgtacttcgcatatgtatcaagtgtcgttgagatcatttgcttctatttggatctgtatgaacgtagtcattttgataatttcattttttgttgttttacgccattgttgttttcaaaattttactacaactacggtggcaggatactgagagacaaattggtaggtcgaaggcgtctttctatgctggtgttacgtttaatttcttctttaaaagctagactatcaatatggtcccataaaggatctataaataaactgctattaatttgggtagtgttgctatagggtggtgttatttcatacaaagtggtgagattcacggtaccgtgaatgctccagacagtatcgttatataatatttgtcgtgtatggttagcccaggctgattgacgctctctgtttctcgatttgtcacaaaatggttcttgattatatcttatggtagtgtacaaccaggttaccatgtcttggagttgtttaacaaaaattggcagtgtataattttctgatgtgtctacattttcctgactgttgttatacagtttagttgttactgtaggcgtattagttgtggtattgtttgcagatcttcgagatcttttttgtgtgttattcttttttggttttcgtcggcggtgtaaacgtctcattccttgttttagtttccaaagtgtaatatgagggaatttaaaaagattacggctcatggcgttagttaggtaaaaacttttggaacagttgtatctaagtaagtttcggaatataacttcactaagtcctaaaaagtagatggactgactatcgaggataacgatgttttttccaacatagattcttgtggtccatcgtggaacgttatataacattggattataggtggtattgacatcacatgcttgttctcctgtgtcattatgtaatgatatattaatcatttcagatagacaattcatggacggaatggaaccgcatgggggtggtactaggagcatagacgagttagtatggttgaacttgcacataatataattactgggttgacgatgctgaagagcgttgaaatcataccagaaatatgtaatactctggttgttaataggaccagcaagcattctgtatttgtctggaaattttggcattggaattgtgtatgcgtaactacgaagagtgggatttttaagtgcttgtatcatttctggactgtatgttgtggtttttgcttttttcttactgcaggtaagataactgcagctaataataactaaccagatacaccacatttttatttcagaacccatgacgtctctgacaactggtatactggtgtgttttgtctatgccttgctgttaacgacgcttctaatggttagttatcgctgcctcatcggttttcaagatgacatcgtgactcgatcctggatggtgtttaaagcgtgccgacaaggcctgtataatacgtctcgttgaataaataccagtacactacaatatacattgtcagtgtttttatttaattacattagttttacaatgcggtataaaaggtagagtccaacaatagctgccaaaatataaattacaatcagtacgatatgcgtgtccgtttggtcgaccactgcttccgtgacttcaaacactgtaccgtttttgaggaacatgaggtaatgagtttttggagattttgctataacatggttatcataattcagtgcaaatagcaggtcatctgtgtcgtagatgtacatggcatttactataccttcagaatcgtcatactccaccagtgtgctttggcagaattcacagtgttctaaagtgatgtttcgaatcattacaatgggtaatgtatcgtgtttgctggaactaggtgaacacgtgctattggcaggaatgtaagttatgattatgctgcgaccgactacggttgttagcactgggaaagaggttcctcttgcaatgtattcagtagatactaaatatgtcgttgcatgtgaaaccgtaaaggctgcaaaagatttagtagttgatacgcagctaatttctggaaaggttgccagtgtttgtggtcgaagagtttctagaacagataaagctgtttttatggttcgggagttggttgctctggggaacattttttgaagatgttccagggcgtggtctctgcggccgctgccagcacatggactgtaaagatcgcttacatgattgtgttcttcgctgccgattagttgtgaccaatgtgacaattcagctagagagcacagtcctgtttcaaatgcaaatatggctcttctttctgcagaatggtgtaacattgaatgaataataccgctggcgaggtagagttcttgtcgagcaaatcgggataagaacgacgatatatgcgttttgtgtaggagtagaatgaggttacggatttgttccatgtcgtgtttgctgacaaggtcttggtggtgttgtttaaccaaaatataaattaatcttgaaattgtcaggacgctagagatgtgtcccgtagttctcagagtggagttggctagttgtactgcgttaggatacatgagaagcgtggttcgtggttgtatttttgacatgcaactggagatgaagtcctcagccaggagaatagaagattgttgatctacggccagtgcgatggaagttggtgttgttggagacgtagatgctatgtaaagaaggattccgtagcctagaaccgtttccactgttgcctttgttgtgctacgacactgtccattttgaagcacgtttaccgcgtgcctgttccaaacggaaaggagaacatctaaatccatatagttttttgaaagtaaactatctgcaaaatctgttgtcttgatatatgtgtgataatgtatatgatcttttttaaccaaaacgattagttgatgacgtttcgtctgttttaaaataaagttttcccgtctgtagggggctttgaacattatccgtttagtgtctccaaagatgagaagcagtggtgtttctctgataaccacggttaagacgacaaagtattctgttaatgctattgtcatatagtcgtgttcagtgacgtaaaaagattggtataagcatgattctcgagtggtgaaaagcagttcatggtctttaaagaggtaacatgtcccattgaaggctggtgcatgtattttggatgcatttacagtagttggtttagcatatgaggttgtagtttggaggcggaggttttccggaggaggtactgtggatgcttgttcttttagattattctggtaactcaggttttgtccataatatttgtactgaatattgtcttgagaaactgtagcgtatgtgtttagagtactggcatattgttgaaatgtttttgatagatctacttggttcagtaggttgtcggcaaattcaccagtgaaaagacatctaggtaattgaaatactgtataatggtttgcactttcatagaaattgaacgtaatggcattttctctaatcaaagtaaggtttcgtcttgtgccgttattgttgcattttgtgctgttgtgtcgcaaaaactgaatgggtctgccggtgagttccagtgtcagatgtgagtaaggttcggatgaggtctcggcgtggcatgccagcagccacactgccaggacacacagtgccaggcctcggcgcatcgcgggtctcggcgttcgatggacaaataaaaccaggacgggtcttaaagtcgcgacctggcctatttaatacgacgtaatttgcgggcacgtcgcgtcgacgagctcttgtcctgcaatgaaagacgcgtcatgtcgttaggaagcggggcgatcacctctctgggtgacttacccaactttcgcaagcgaaacggacagaaaaagcatttagatatttatcgccgcatcgtgcgggcctttccgtcctttgtggcgtttaaccggcttctgggggggcttttccccacttactgcaaaaactatcgtcggtggctttttttcgaggtccgcttaacgcagcggattccagactgtgtggtgctctttgtgtcaccagaggctcccagacgggtcttatgctacgtcatcgagtttaagaccacttgctcggacgctgatgggcagtccgtgcggcagcacgtcacgcataacttgcagtatgtgcagggcctcaagcagctcaagggtgctctgacggactttgaggctctcaaggtgcctcgaggggattcctggtccgtcatccccaccatcatctttttccagcagcaagccacgcagccctctctcgctcgggctttccgatctgcaccctttactctccgaacagattcggtcattgactacctcaaacggcggcaggatgagtctgttgcaaccctactatcggctacccatcgttctgttcgagcctcatgccgaaaacattctcaggtgtcctcctcacgtgctacaaaggctagtggacgactccgtcgcggggctgcgcaaggaggaagtggtggccaaccaggtaagaaagcgttacctgcgcgaagagctcagcgatctcaaccaaagaatccagacgtactgcgaagacctggaaagtcgcgtgtccgaggcggaggcgctgctcaaacaacagtgcgaagtcgatccgccgccgtgtcaggacgtcgccgccgcggcaaccgccgcaaaggagatttatagttctggcggtgggcccgaagcgccgcctcagaaggtcacgcgttcggaccgcggtcaagctgcaacctgggtggcgcaatgctctgaccaagaaaaagaggttctattttttggaatcactaaaaacgacccctttatccggtttcatactgattttcggggggagctcattaacaccatgttcgaaaacgcatctacctggacatttactttcggagtctggtactatcgcttgaagcgcagtctgtacacacaaccgcggtggaaaaaagcattccgcctggtgcagatggaaaacttctccatctcacaggagttgctggtgggggcggtgaacgctttggaaaacgtaaccgtgtatcccatctacgattgcgtgctctccgatctcgaggccgcgatgtgtcttttagccgcttatggacagaatcactgggacggacgtgatcttccgacctctatccaaggggtccttacggaactacctcacttgttgaataaactctcggatgaggtgggtcgtgagatcaccacttgggacggtacggccaccgcgaattactatgcctatcaagacccccctgatctcaagtactacatgcctctgagtagcgggcgtcattattccccgggaacattcgatcgtcatgtgttggtacgcgtgtttcaccggagacaggtcatccagagcctgccaggatatggggcgcaaactgcggcagtggtgcaagaacgcatgtcgggacaggtgcgggatgacggtctttccgtgtggtgtaggcgcctactggcgggcaaggtgggtcgtgatgtacctattttcgtgcacgaacaacaataccttcgttctgggttgacgtgcatcagcgctctgctgctcatctggaaggttgtcaactctgagagcgtctttgcgcctcgggccggcaagtttacgctcgctgatatcttgggtaacgacgccctcccgcggacgagctcggaggatgacagctacagttacgggcatagggtcaggaactttgagttcctccttgagcattacatcgtgccgtggtatactcgggatcccactgtcacgatttctcaattatttcccggaatcatgcttttggccatcaccgagagcgtgcgcagtggctgggatcctgcgcgacgcaatgatggacaggccggtgacggcagcgggaccgtgctaatgcaaatcagtaaggtcaatccggtggccgatttcatgtttgcacaaagttccaagcagtacggggaactgaagcgtttggaactgcacgacgcattgctgtttcattgtgaacacggtttgggacgtcttctgtcggtggctttgcctcgtcatcgtgtttttgcactgggatcgtcattattcaacgtcaacgatatttacgaatgcatatactttagtgtcttaggttttcttccggctgttgtagtgatgtaagtacttgtggtttctgggcagcataaaggaccgttgtcctgcatgtgcgggctagaaaccacatcagaacaccttctggacgggtcgttgtgaggtgctgccgctgcttcacattcatctgaaaccatgattacggagcgcgtcctcgcaggcatcctcgcgggcatgacggccgcggggagtttggtcattctcctcgcggttgttatgtggttgaacatgttagatcgcgctggcatgccaatggccgttgggcattacacagggaacctggtgttgactcaggtcatctgtatcttctccatgctggcgtctaaaattgttggcatgacgagtgcggccaacatgggcttctgcggcatcgtggtttttctggaagacactggcctctatgtcacctcgctgctcttcatgtttatgatcctggatcgcatggcggcttttcttaacgggcgtcttttctggaggcagcagacgacgaagcagaatctgagtacaagcgtgtacattattctgttttgctgggtgttgggaatggccgcggctgttcccagcgcggctgtggctgcacccaattccaggtgggaacgctgcgaaattccagtgtcatatgccgcaatcgacatgattgtgaagctctggtttgtgctgttggcacccgtcgtgctgattatggctgtgatcattcaatcttcctatcatcgtgatcgggagaggatctggtactatgccagacgtgtgttcatgttctacacggcctgctttgtcatgatggtgccttattacttcgtcagagtcatgctgagcgactttgctttggttgatataaaaacaaaaacggcgaacagcgacggttgtgattcgacatttcttgattatctgaacatgttcactcacgtgatttacagttttaagttggtggtgtttgctttgttcattgtcctgttttgctccataaacccgatggaaacgctggaagaatgcttggagagggccgatgctgagaggcaaagtcggtcagaagcatcccagggtgaaaggaggctgccaatcaacacatgctgtataaagttgattgaattgataaagcagtatgtaagcactctctctaaagccacgagggacaattctggcgaaagggccaatttgccagagaatgctgaagatattggaacaactggcagtgatcagctaccgactgaggtcaccgtgaccccaaattcatcggctgtgtttagcactggaggaacggtgtctccagtctaacgtgctcttgtgctgcgtgtgtaactgacgggtcaggtggatgatttatgactctgtatatcggacggcgaatgtgtgcatgtatatcggtgtggttacatgtcaccacatgccgtgggtgtgtgcagggctttggctgaggccacggcctcgggattcagtgtcattcgcggggtcaatgataatgtacccgcaaaagctttgtaatcttcaataataaaagtgaaaatgcccatctcgtgtcgactcctttgaatttcgaacgcctcgctgctgattgtcattttgcctgtactgatcaaataaaagtaccacattttctgacagatgatgcggatcaggggctcatacgtggctgtaccccagtgacgggtaaaaaaagcggccaggcggaacaatctgtgcccgtacagtgtgcccagagagaacagcagattgccgttgcgggccagatcttcgggaaaggaaatgagcagtcccgtgtggcgctgcacgaagcggcttagtaacgccgtactcagttgcggctggctcagtttctggctcagctgggcggcctgttcctcatggaaaataacgtggaagtcgaactgagggaatgtgcgtcgcagttcttggtacaagttgggccagtacgaggtcggtgtttttcggctcagaacggcgttatcggacacgcctaggttgttggtggtttcgcggagtagcaacgtctccaggccgcggttaaacagtaacacgcagataagcctcagaatcttgagttcctctagtcgcagagtgttcagcggctggccccgtgacatcttttcgctaatctgtaatattagatgattggcacacgtaaaagagaatttgccagttcgcactcgggcctcatccgtcgggctggacatggcagctcccgtctatgtgggaggttttttggtgcgctacgacgaggctcccgaggaggccgagctggttttgccttccgacgtggttgacagatggctgcgcgagtcacgcggcccgctgccgctaaatgtcaatcatgatgagtcggctaccgtgggtcatgtggccggactcaagaatgtgcgagctggtttgttctgtttgggtcgcgtcacgtcacctaaattcctggatattgtccaaaaggcctccgagaagtctgagttggtgtcgcgcggacctccatcccagtcctctctacagcccgacggcgtgctagagtttctcagtggcagttattccgggctgtcactctccagccgccgggatataaacgctgcagatagcgcctcgggcgatgcaaaaacagcgtctttcaagcatgtggccctttgcagcgtggggcggagacggggcacgttggctgtttatggccgcgagccagattgggtcatggaacgcttcccggatctcacggaggccgatagggaagcgttgcgggctcagctgacggcaacagccgcggccgcggggggagaggaggaggacgacgttgtaaggaaaaagaacaacaacaataagtcccaggggcccgacgcggatccatttcagtccgattcgtacggcctgttgggcaacagcgtcgatgcgctctacattcaggagcgccttcccaagctgcgctacgacaagcgcttggtaggggttaccgctcgggagtcgtacgtgaaagccagtgtttcacctgccgagcaggaggcgtgcgatattaaagtggagaaggagcggccgaacgagtcacagcacagccgagcacccagcgagtccatgtctcaccccatgagctctgtggccactccagcggcctcgagcgtcgcgccctctcaagcgtccttggcactggcccatgacggcgtttatttacctaaagacgcttttttctcgctcatcggggccagtcggcacgcgaccgactcggcgggagcgcgttccgtgtatccggctgcacctccgcatcatgcgtatccggtgatgaattatgaggacccctctcgtggttttgactacactgcctggttgcggagggcggggtacgacgcgggacatccccaataccctcctgttccctttcatcatctgccgccgtatcgtcgacgggatttttccatgatggatgacagtgatcgcatggcttgggagcgcgggtacgcgcatccttccaactacgactcttatggcaataatagtggtaattcgtggtcgcgcggccgaaacggtggtactggctcgcacaacaacggcaacaagaggcggagggaccgagatttatcttcctctgacgaggaggacatgagttttccaggggaagccgagcacggtaaagctcggaagcggttgaaggctcaccatacgcgaggtggaggaggagatcactcctccgacgccaagggtgaccaccgctacgatgaaatcagagaagctttgcaagaacttagacgcgagatgatggctgtgcggcagattgcgccgccggcgcttctcgggcctgctcaactgacggtcccaacgtcgtcacccacaacgacgtctcacccgtctgatgtggtggtgactagtgaaccgcctcaaacatcgtcgtcgccaccgtcggctcacagtagcaagtccgctgatcgcggggtggtgaacgcatcgtgcggtgtgtctgtacaaccacaagatggcggtccaacgccgcccgtgaaggacattgtggacttgaaccgccgtttgtttgtggccgctttgaataagatggaataaatcacacatacacagtgatgtttctttgttcataaagctctttttttattatgtacaacaaaatattattacatggtacgcaatttattgtctattttcgttatttgtttatttaaattcgaggtcgttgtggtcggccgctgggggagcgacggccggggacttgtgctagggcttgaagggtggttttgaggtcggcggcggtgcaaatatctccgtccagttcacttcggagatacgaagtatttttcaccgcctcctcggctattcgggcagtcaggggcattagcagatctgggtgaatatacatattccatgaaggtacaactagcagcatggccgttttgggtaatctctcacgatgagtcaccggcgccgcggtgccttctcgtttggctttgtgggcttctcttcggagtctgtccatggtggtctgcggctcatcgtcttcatccgaggagtcttcggattgaaaggggtcaaagatggcctccgtgataataggaggagtaattggaggaccttcttcctcctcgtcttcgctggaagacgaattgttgggttgctgggcgaattcggagatgccgcgtaaaatggagtccctgggaaacaagccggctcgaagacggatctgagagcatctcggggtttcggtcttgttgggcaacacgccgaccgagcctcggcgaaataagtggataaatccaagcatttgcatgtgggccaaggttatcgcgttagctgtcagattctgcacgttaatggtaattttcatgcggttgggcaggggacccgcgtccatgctaatccccgggagctccaggggaaagaatacggcgtaacaggtgtcctgagtttccagcgcgttgttaaattgcaccacatacgtctgatgagcgggaatagtgacgtgcagggggcatttcacgagaaagccgttttctgagtgtctctcgaagaaggggttagggttatggcgccacatcacctcagcgcggtgagcgtatacagataattgcaaaaacacctctgtaggtgggtggagagagaaatggatgagcgacactaagatcaaattctcttcgcctatggtctcgactttctgaacatacgtgtcaccgttggaacaggccagttggtcgatggcgtctactaaggtgagaggtatgaggccagtgaggaacgtgaagtcggtcgcaaacgtgtaaccgccttcaacgtactggtctcgtttacgagtccacgtgatagcgctcacgttcaccttcacagtccaggtatactgggctcgacggatggtggtgcgggcgttggctctcggcggccgattctggctgtttcctcggccgcggaacaggtggatgcctgtcacgggaacgcgtactatagggagcgcgaaaaccagcatagccgatgtctgcgagccgggtgagaggcgccggttggcgtagttgcacgcgtccgtgcgcagcgagtctcggaacgtagaactgcaatgtcccttgagatttaggtcagtaagctgcaacgcgtcgcgagaggacttcatttcttgaaaagcgcagatgacggcccgattggccacctccacggaggtgtgccagttcatcgtctgcacggcatcgacgtccagcgggctgtgttgcgtgcagacgaggcgcaggatttggcaggtgaggcgttcgaaggtgacggccggggcgagggctcgagaggtagacggcctgggctcttcttcttcctcgggagggcgatccatgatgcggagaatgtgagagctggtgggaggccggtgtcaatgacgtgatccgcaaatacagcacccactgcttacctaagaaataagtgtgcggtctcgggggattggggtttttatataggtatgggtctattcacagggccttttgctaaccgactcgccactggtagacggtagctgctcggaaggtgagtagtggcgacgtttgggggcttgatacatgtgccaagaacccgagaggcctgagaagatccggaggtcgtcgtcgccttcccaggagaattcttggtgaggtagttgatcgccgcacacgctggctatcatgggagttaattctgtagcgcggacgccaaattgccatattccccagtacaaagtggggaaaaagtcgtcattttcgtcgtcggagctgcttttctttgccgcgtcgtcctcggtaaaacgtttgcgctggacgagcggtttgtaaagtttctcgcgctttttagatgcggaggatgatgttccggcgtgtggtgtggtggatgcgacctcgaagacgtccatatcctccgattcggaggatgagctggaatcatcttcgctggagtcttggacaataggaacgcctttgccctgatggtattcaaaactggtcgtgatgcggtattgatctctaaaaatggaatgatcggtttttttatacgtaaaaaacaagttacgatcgaaaaagtgaagcgaggctatggcctggaacggctcgatatacacactgtcgtgcaggcttctgatttccataaagatacactgtgtggacataatcgggttgcatgatatactgcatccgggaacgcttttggggcaaataaagccaatatacttgtctgactcaaagtatgtatcgatcatgacgttggcgtgttctctgggtttcaagtggagtcttttgggatttagaatagtgtagccgttcctttgttgcggcgtaaggaagggcttggggttgcggttcatagtgataataccgctgctttgttcccaggcgagatgaataaacactttgtcgtctggggtttcttcttggaaagattccaagaagattcgtaccagtcctttcactttatcgacaagttggatttttctaacgtgtgtactgcgcagggagcacaccagttcatttgcgacgtttatgctccacagcggcatggggcttgtattgacataaaatgatgcggtgtggtgcacgccgtgtggcatccagcggttgtatctttgggtccattggaggtgatacgcgttgaaacgggtatgatacccttgggcaaacgcctggacagcggcatcgtaagtgggtaactcgggattatacgtaccgcctggatggagtgttaggtcggcgggtacgaggtgtctgagcggcagggcatagagaaaaaaggacatcggttcgtccgcgggcgtaatgggtttgtcagtaggattgtgtacatgcaaataaacatctttcaattcttggtcctcaaacgtcatgtgtttaatttgaagagtattgtgttcgtagcgaggatctggtttcagatttcgagcgaactgtgtgagaaagatgatggacggccgatggacctggacacgaaggcctgttttgacaatcttggtttcgtgcggtttgacaggttcacgggcttcatcaaacacgctttggatgactttgccggcgatgggccccaattcggatacataatcgagccggtaacgttgcgatagatccatgtggactgttgtcgagtgcttttgcgactgacagctgcctgcagggtccacatgacgtcattcacaacctaactacggtgctttttaggaaccgaaaccgtgcacgactctggaatgggttcaaggcgcgtgtggcgacggcgtctttgtgtttgatagggctggagatcgatttctatacccgaaaaagtgcgatagtcatcgccttctccccaggggaaatcttggtagggtagtctgtcgccgtgggcgctagccacaatgggaaccaagctcgtggatttgatgccgcattgccagtttggccacgagaaaacgagtgtttcgcggtcgtcatcgtcttcttctgactcgtcgctcgtttcggccttggtgacgcgatgtttgctgcgcgtcgtcatggtggacgatgccgccgaggacgatggttttctgctgctgctggctggcggctgagatggtcgtcgcgcagaactaccactgggcggatggcggaaaacctccatgtcggagtctgaggcggaggagccgctttcatcgtcggcctggtcgccgtacacgtgatggtattccagtttggccattaggcgatgctggtcgaccaaacgcgcctgggcaggttctgtggcggtacccttggtgagaatcattttgcgatcgaaaaagtacaaccagccaagttcttcgtactgttcgatgtacaggctctcgtgaacggctttaatctccataaacaagttttgtagcggcaatagtgggttacacgacatgctgattcccgggatggttctgggacagatgatggcgacatacttgtcagactcgaaacaaacgtcgaacatgaggtgtgaggttttccccggcttcaaatgaagcgtctgcggacacagaatggtaaatccgtttctgtcatgtgccctcagatacggtttggggttgcgattcatcacgatgtcatgattgccgttctcccaagcgagatgaacgaagcattttgtttcgggagtatcttcctgaaggcattccagataaaccttaacttcatccttgcttattttccgaatgttcgtcacgtgtgtgtgcggtatcgagcaaacgagctcgctggctgtattcatagagcccagcggcatctgttgactattgaaaataaacgatgtagtgtgataaacgctgttggctgtgtatcgactctgatttcggctccacaccagacgggaggcagtgagtcgggtgtgccattttttgtcatcaatctgttgtaccacggcgtcggcgaccgtggtgcggcgcttgtgactttctccctggcgtaggatgagctcgggaggggtgacaggatctagcggcaaggcatacacgtacatagacagcggttcggcggtggttggaatgggtcggtcggttgggttgtgtacatgtacgacaagcggttccaaacttcggggctcgaaggccgtatgtttgatctgaaggtttgtgtcatagcgctgacaaggctgcgattcgggcgtaaactgtgtggctagaatgactgatggctgattgactctgacattgagatgtgtgtccgcgatgtaggtggtgtgcggattcaagtgttctttgttggcattgaaaatgagtttgacaaggtggcccgacgtcgggccgagatcggttaccaaatcgggaaaccgatgcggtcgcgaggccatgttgtctgactttggcgacaccgccgactgagctgcgcaacttggctcatagagctatttagatgttatggcgccagaaaaaaataaggatatacaacgtcattatgtaaaaacggttttattacgggggagaggcggaattttgtggctgttgctgctgtggttgtcgctgattacaaaccatggcgatagtgaccggtttgttgttgttggtcggtgattgttgttgttgtgccgtttctggactggggttagagacgcgcatgggggctaggtcctgtaggctgaatgaggcgcctaagagggaaacttggtgcggcgtgccgtgcagtgacgacttgacctggttggccaaggcggaaagccggccgcgattgaggctgtgtttggaggagataaagtacagttgccctagtacggtgtttttggggatgtgtgtgttgtcgccgatgacgctgatttctaaccaagtccgtgggagccagatggtgactggcatgttcagttcttggcggttgtgtggaatgaagagtcccaggaacggtccgtaaaagcggcggtagatgcggatcaggtgggacgttttgagggaaaggtcgtacggcaggcagacgtcgagacctccgccgggctgctttctggggagaaagtagggtagcggcgtgtcggagaagaaggggcgcgtcacggtctgctgtcggaggcgcagtttgaacgagacgatggggtttgatggcagttggtgctgcgcgctgcggaaggtcacgttgaatcgcaaaatgttatcctgatacaggatcagtgatgaaagaatcaggtccggacagtcggtgtctgtgtacagctgtccgaaagtggcggggcccatgttttggatggtggcgtccgacagtcggacggagatgcggctggcgaggccccgcggtcccgaaatgcctccctctgcggtgtgccagcagagggcggacttgaccggtatcgtcagctcggaggtgttgctaatcttgtcgttgacaaaggttaaatccggcaggtgtagcgacacgcagtcgtgcagcgcattgtgctgagtgactttccgccgcagcggcagctggtgcctcaggggcggcatggttttcagggcgaaaatgttgagcgacagtctcacgatagacatttgggtcagttgttcttcgataatggctcgaatgatattgcaactcccggcctgagcgggaaacgggctgaggatagggaagatgtctgagtcggggttggcgacggcgcatagcaagccttgctcttcggggtcgcggtgcgggctgagcggctcgagctgcagcagagtcgaaagcaggatctggaacgggtgctggaggtcgctgggctgaaagtccacgtgcagctgaatgagacgatatgtgccctggcgcggcagcggtcgcttcacatggtgctgatctgtcaaggtcaggatcgtctcgtccagcagcagggaaggtggggtctttcgagggcggccccgaggcccattccgtagtgttttgtcggcgcgcggcatggtttgagactgatggcagctgtgggacggctcagcctttaaatatgcaggtagcggatttgttatcgggtgacacgtcacagaccgtgaacatgacctgttcgtggatgatatcatcgagttgtctcagcatgacaaagagtgccgagagtcgagaaatctcctcgtcgggcgagacatggctcggccgccctcggaggagtctgttgctattgttgccgccggtaccgtcgtcgtcgcggttcagtcgcattaagagttcttggcacttggtcagcagcatagagctgtcctccagggctagcttgcggacgtagttcacggtgagatcggaagcgaggttggcgaccatggacatagacagacaagcggttttcatgtccagtagtaggtggttttcaatgacggggtcgggaatggtgaaggtcgcgtcacgaaacgtcacgtgttgcagttgattaacggcggctttgacctcttcgtacgagcggtccagcgagtagagcgccataattaggatcctttggttgatttccacggcgagcggggctggcagcagccacggaaggacgagattccagttacccacggagaccgggtgctcgcgcacgagcgggcccgaaaagagcgggggtagttggcagagcgcatcgcccttttcccagagcacaggcccggtattaagaacggtataaagatgtccgtgggtgggcacttgcatggccagttggttgccctcgattcgccgtaagatggtcggcgtcatgtttcgtagcagactgcgaaggcgcgcatagccgcgggtgctgtcgatgtactggtgcaagcccagatgatggtgtttgatgaggtgatgtcgctgcgggatggggataatggctccggtgagctttgcgagtttgcccacgtccgtgaggctaagtttttgttcgaaggtgcagaaaatggtgctgtccatggcgccggtggttcgtccggccccgactagcgtgctctgtcaaatagtcggatgcgatctttacgagttaaataacatgtgttggtgcagtgggatggtttcgcctatgatgtagtttccaaagtgggtttccgacgtcgcaagtgagcccgacgggttcttgagcttactctccatgagagcctgcgtggtcgtggagagaatgggcagcgcctcctgcatcatccggcaggggcactctatcagctgttctgtgccctccacgcagatgtattgagtgtcagtgtccccccggatacagtctttggctcggaggaggtactcgtcgatggtcttaaacaacgtcttgttggcgttgattatctcttctgtattgaagaactgtgcgcacgggctgtagaactgcgagttgtagcctaaacgctcgcggtttttaatgttgtacatgatgtcggcgagcgagccgcggttggacgcccaagggttgtgggtggaggcaaatgtctgcgcgtcgggctctgtgtggtcgtacagagttttgatggccgcgtcagtatcgtacggatccacacccagcatgcaggaggtgcgaccgcgcgggttgtttgggattttgaagtagttaatgtccgtgctgacgggtgtaatgatgagttcacacgctgccttttgtccgtgtagattggccgccgagtttttctcagacatgctgccaaaagtcaacatggagatggtctcggtgtcgaggaattgcggcctatccacgccggctgcgtggcggacccaacgatccacttcgtcgtgtcgatgtacgtgcatgggaaagacgcggtataggttctgtacgcgcacgcccatgtcgctgcgcgaacggttgagatacgccacgcaagtagccgaggtgtatccgaggcccatgtctacggtgttgatgttttgagtgacatggtaggtcgtgttgatgtctcgctcttctttggtcacttgcgggttgttgataatgagtgacgtgcatgacttaccgctgtagagcagcatgtcgacctcaaacgtgtcagtccgcacggctgtcagcgcgaaacctggatgaacgccagatttggccatcagggcgatagacacgggggaaatcttgtagagcatacaggccagggtaaggacggattgcaaggtgttgggacaaccggccgtgtaacgcgagaagggcgaccgcagccagttccagtactcgtgtgcgaaggcggtagccagcggaaaaccgccatcgtgccggtggtagtgcggaaagtcagtcacgaaacgcttgatatcgtcgttgagtgcagcgcagatcgtaggatctgagtagaaacggtggaaagggacgacgatacagtactcggcaagaatcttgggtgctgtgatggcgcagcagccgttgtacaggacgtgctgcaaggatgtgaaatcggtcgccccgtggcgttgggccgggtccagctgagcgcgtacttccaaaatcttggcgtgctcgggcacgaactgcagaaccaagaagagctctcggcaggcttcaaataggttgacgtcctcgttggtggcgatctcgtcgaccagctgggttaacatttctccaactgactctggttcggtgggcatagtgaaggcggggcgatagaaaagatcgaccattagagttttcaggttcagtccgatgccgcaggcccggttgttggtcatggcgggaagaaggcacaggtagaaaatcttctgcagcgtccactcgtcgtcggtggcctgatagtcgtcgacgaacaggggttcgtcggcgtccatggccgccatgcggggcacgtccgaaactccatgatggcgagactcgatgttggcggtgttgagcggctgccggtcggcgatgatctgcacgccttcgcggttccgaggcaggtgacacacgaatggcggccagagacgatggtcgtggagcgcgttggcgtaggctgacaggggttcttcgactaactggccgttgttgaggcctggtagggaagacacgcgggtgacgagccgcaggatagccataatagtacggtagtgggtatggatctgggaggagaggaggccgtcgccaagatgttcgacgatcatagcgatcatagtgtagctgtgggcgaaagccagcatttggcggttctggaacgcgctgacgatacatctggcgatgaacggtcggataactaagaaggcgtcgacgttgccgtgcaccagcaagtcgactaggtagaagagttcgggatagttggggcatgtcacggtgcttttgaacaactgcaaggtggcctcgtagtcgggaggcggtctgagtcggaccatttcggctatgtgcgaggcacgtagttcttgaaaggcgctgggcgccaatccgtccgggatgttgccggtcacgattcggggggtgcacagggtggcggtctcgccattctcctgatggtgcgcaaagtcaaaaaaggggtggagttcggtataaagggacaagtttcctatcttgtaaaagtcagaaggtgtgtagtcctgcttcacttcgttaggagtgcgcggcacttctcggcgcacgcggtaaaagtgtgtgaggcgtctggctatcccggccatgctctcctgttgaaagcggcattcggtgagtctggccacagccgggtcggtcggcacgcctcgctccgtgaaaacctgcagacagggcgtcgcttcgtgaacgaccgggtggcacaggcattgcagcgcgtccacaaagtcgagccgctcgagcccgcggtcgcggttgagaagatacacggaggtgggcagcgcattgtctttggtctctgtgagtttgattttgttttccaccgtggtgtaagccctgctctcggggatgtagagccctaccgggaagaagaaagtaagatcgatgttgcgttctagggggtttttggtgtcggtgtttttgtacacgtgcctgtggtgttccagggctacggcgtgctctcccagctgcagaatgtccatgggcagcgacgtttggctgttctggccagctttttctagcgaggagccggtaagatcggggttgccggaggtaaggtgagcggtgtaggagttgaaatcggccaggatagagtggtgggcgatggcggtaacggcgttttcgggactgaggacaaagttaccgtacgtggccggggcagagacgccttgtttactgatgttgcttttcaggagcgtcatgagagtttggatcacctgagcggtgctgaccatgacacctcgcagctgctgcccggaggccgtgacatacgtggcggggttttcgaggatactgttggtggtagattccaccattttggtcaacagtttgaggatgtagtcgcggtccgacgtgcgattcagcagaaagatagtgctgatcatctttgttttgaaactctgtaggatgttgctgcgctggatgcggttcaaggcctgtcgacagagcgtggcgttctccaccagcgtctgcaccacgaagtaaggaggcgctttgcgcagcagcacctggatgaagcagtggatgaggccacgctccatggcgtcggcggtgtttttgaggacccgcagtacggtgtgaatagcctcgatattgaggattttgtcgaggatggtgttttcaaaggtttctcgcaggtgcgtgaggcacgccgcgctcagctcgaaggggatggtgatggggcttttttcactgtatttagtgaccataatggtggtttggcgtgaggtgggcattccggcgccgctggccacgcgcggcacctggatgtgaaagagcatcttccccgtggttagtttgttcaggtcgtcgaacttgatggcgtgcgcagccgaggccagggccgtctgaaggaagtacacccattccagacggttgcagaaggtgccgaagatggcctcgaagtggatgttgtagcgttccgggtcgtccccgaagtaaatgcgcaggctgtcgaacatttcttccccggcgctggttttgacgtgcgtgaggaagtcggcggggatcccaaccttgggaagaagctcgacggccgaccagttttccatgacggcgtgtgaggatggcttcgtcgccaaccgtctttcagtgtcgcgcggctcaggacgctctaatagtggagtcgaccgcggaaccccaggtcgtcaatgtccccgtacacgtgaattcgtacaatctcacccaggagttgtcgtccgttgaggacgctcgcttctgccagacgcagccggtggacgcggagcgcgttcgcggcgtctttggcgcgctctaccgcgctgcggccccgcacctgcgagaggagagtgaccgcatcaaactgatcctgggacgcctgttactggggcccgtcgccgtgccctgctactgcgacgagtgggaagcgaatgagtatatggtcgatgcgcctcagttttgcggaggccctctgctgtatgtgcaccgtcgctgtcactgtccgattgtggggcgcgcgctggctttcaccgtcatggaaggccacatcgccacgcacgtatttcgaggattgttgtcgctcagcgagtggaaccaacatttgccggacatgttttgtccgtgcggttcattggacagacgggatcgctacagcatggcctgtttgccgcgggacctcacgttgtacattaatgattacccctatttcatgatggagatagggcgcgtgctcactgtcagtgaggtggacgactacgtgagtttaatgattaactacctgggcgaggccgtaacacctcgcctgcaagtacattacaagctgttgttcggagtcaacgtgaggcccgtggcgccattagccctgatttcgacgtgtgagttttttgtgctggaactacaaaagatgtggctcggggtggaatatcacaacgaagtaacggcggatttttttggccgcgtgttttcgcagctacaccgtgatcggggacgcgtcatgatggccctacggctgcccgagcagactgtgtgccacctcagccattttacccttggccgctttaagcgccaagtgttgtactttaagctgtcaatcacgtacggcaagtacaaagcgggggtagcgaaaaacgtgttgtgctacaggcgtctaagcctggcgttcggtgaacacgataccgtgtggagaaatcttttttacgtatattacgaaatcggtcggctcggaacagtgaactctgaatcccgttcatcacccccaccaccgtcgtctgcccgacctgtcaatcattcacagccgcctcctgctcgctggtcatcggcgtcgtctcgcggcccagctacaacggccggcgtgacgacccaccgagattcgagcggtgaccgcttaaaacgctacgtgtgcattatctctcggctcatgtttgtacggtacggacaaacataccgcagggagaaacacgatcacgtgtttgattttactggtcgcaccctacgagaagccgcgcagcaacagcgcagacaaaaacagttggcggcgcagcggcacgccactagtcggcgaaagttcatcgggggtatggagttttcagagattacgggtgtcagtctcgatcgaatcgccgtcaacgcatttaacaccaatagggtgattaacatgaaagccgccttgtcgggacgtgtaggttgtcgtgtcaatcgcttgccaaaaaatatgactcatagtttcgtgatgtacaaacacactttcaaagaacccgcctgcactgtcagtacttttgtgtcgaacgatgctgtgtacactaactctctaaacgtcaatattcgcggctcctaccccgaattcctttattcgctgggcgtgtaccgtctacatgtcaatatcgatcatttctttctccctgcggtggtttgcaacagcaattcgtctttggacgtgcacggtcttgaagaccagactgtcattcgctcagaacgcagcaaagtgtactggacgacaaactttccatgcatgatttcacacactaacaatgtgaatgtgggatggttcaaggccgctacggccattgtgcctcgagtgtcgggctgtgacctggaagcgatcttgctccaggagctgtcgtgcattaaaaacatgcgagacgtgtgtatcgattatgggttgcatcgtgtgtttaccaagatggaattgcgaaactcctatcagattccctttttgtctaaacaactgattctttttattcgcgcatgcttgctaaaattacacggtcgcgataaaaggctgtacttggatcgactagtatttgaggctgtgcaacggggtgtgttcgattatagtaagaacattacggcgcacacgaaaatcaaacacacttgtgctttaattggcagtcgtttggccaacaacgttccgaaaattttgacgaggaacaaaaagattaagttggatcatttggggcggaatgctaatgtcgtgactgtgtgtcgtcatttggaagccaacaaaatatcccgtgcccgtctcaaagtgttggtggacgtgttggccactcttcagggtttgagcgagacgacccatacacaaaacgtgatccgtcagactctgttgcgtctctgtggcgcggtcccgtcctccgcatcttcctcctcttctgtttaataaaaatttgtcatggataacgataaaaacaaagccggtgtctccgtctcttccgacgaggaattacccggacctgggtggcgtgatgccgccctgatcatgcataatggaatggttcgcgaacatatgttttaccaccccgatgtggcagagatagtacggagaatgattcctccgccgcccgatgcggaagagggatgtgtgttcgcttcggagctcgctttctacaccagtggtcgttgcaatcgcgcttcgtcggtcttttccatatattggcagaacaacagtgagatagtgtacgcgatgactggcatcactcattgtatcaaaatcgtggttgagtgcggccaggtcggctcggactccgtcgaaagacagttttacgatagccctggaatttatctgatccgtgtttcggacggcacggtagtgccacgaaacgtggtgtggccaggaaccagcgttcgatggtcgaaagaagtgggtattcgggtcgtccagcggcgcgtcaccgtggctcgggcatttgtcagtttgttcaggaactatcttttttggacaaagcaaccgttttccgaggacctgtgcccttgcccgccagatgtggaagatcggctgtttcctctactaaatctgtcgcgtggcgacattgaggtgtttgacaaaaaagtgtgctgtgcctataaacggttgcagaagaacgaccttccgcgagcgggacggcgtttattagatcattgtgtgactctggctgcctcaaaaaagattttattactagatctacctcgattggaaaacttttttttagcacaggtgtgtttgtatgaactggatgaggacgaggtgggcgaggaactgctgggaatgctgtgcggaaaatctaccgaatcggactccacgtttttgttacataggaaaaccatgaaggtggcagcgtgtgtagcctttattctgaactgtttttacaaacatcaggaacgcttgccagaggtcaataatcgagtggatgaatgtgacttagcggtgattgccctgcgacgctattaccggcatcacgccggtatacagacgcgcgctatagctatggcgcaaaaatttttgactgattattctgaatcgttttctccgttcaaaagcttttctcgcatggaggtccaggtgcctctggacgcggccgtcactcgaaaacagctcgtagccgtgttacgatcctaactggccttgaatcgagcggtgtatatgtcatcacacaggtatgtggccatgataactgcaaccaccaggtcatccgagtacttgtggtgccttttggcactgtaagtggtattgccctctgccagggtaatgcgatgtaaattctggatttgttctaagagatattctatggggtcatgattaagctttattgtatatgaaacaatttcttgtgaagctttaatgtaccctgagttaaatcgggaaataaactgttcaacggctaggcgtttgtcgcgccccatgaggtagaaaggctgttcgatgttgttctgatcgggcgtgtggtaaaacaacacggggatcagactgttgcattgcacattttgacggatcagacaagcgatacgcacggcggcggcctggttggagttgccttccaccgctatgcgcagctcgttgatgtaagggtggaggttgatgaccgacgtcagcatgtgtgctgcgcattcggctatagcggtctctgagctttctgacaagtcacgcagaaagtagtgttcgagaccgtaaatgatgaattggtggcgatacagacccaccgcggcaatccccgtaccagaagccttgcggttggtggtaaaggccgggtcgaggtacacgtagattgtttttccaaaatgttcctgcgcattcacattcagggtgctgtagcgcagaatgtcaaactcgtcacggctctggtccgtgatcagcacgttactttcggtgatcttgttggtgccgcctatgatttcgtccatgaacgaacctggcataaacatattggcggtcttcctcacctgagagttgaggctgataaaggtgggtttatgcaggcgatagcaggggcacgccgtggcgtcgcccttctccgtaaaggtgtgcaggtgttcctcgcacacgtaagaaaccacgttgagcatgtcgaacggggcattgttgaggcgggtgaggaagcaggtggcgtcgctagttgtgttggtcgacgagatgaagatgattttggtggtgttttgcgccaggaagcccaggatggtgttaaaggcctccttcttgatgaagtgcgcctcgtcgaccagcaggaggtggaaattctgtccgcgaatgctctgagggatagagaaataaaaaacaaggcgtggttagcaggggtggaaccgaggcctatgacgctcggcaacgcccgcgtcaggtgtctacataaaaggtgaggtggcttccgcctggcacgagaacgcggtcatgaacgcgctgttggcggaactaaatcggctgggcgtgtcgcatgtaaccacggaagatgtgtttacttttgccgaaaacgtgtttcacaatttcggttttcttttccagaccgaagagtcgggccctcggaagattgatttagtgtcgtcgctttttgagcacctcacggtggagtgtgtgaacgatatcctcgatgcatgcagtcatgaatcatcacccgacgggaacgggacctccgcggcatcaccgcatgcacaaaaagagcaaggcggcggcggcgggcgcactggacatgtgtgatgtgtctgggacttgtgacatgaggcacgtgcagaacgtgtttacggaggagattcagctccactccctgtacgtgtgtacacggtgtttcaggactcacctgtgcgacctcgggagcgggtgtgctctcgtgtctaccctcgaggggtcggtgtgcgtgaaaactgggctggtgtatgaagctctgtacccggtggctcgggagcacttgctcgagcccatcgaagagacgtcgctggacgacgtcaatgtcattggagctgtgctggctgaggtgtatcggtatctcatgagccacgcggctcgctatgccgatgtcattcaggaggtggtggaacgggatcggctcaaaaagcaggtggaggagaatatctatttcactttcaataaagtcttccgttctatgcagaacgtgaaccggatctctgtgcctgtcattagtcaattgtttacccagcttattatcggtatctattccaagcagaccaagtacgattcctgtgtcatcaaagtgagtcgcaaaaagcgggaggacgcgctgctcaagcagatgcgttccgaatatggaaacgcacctgttttcggacttggcgtttgagcaggtctttgaggaggacccgcagttacccctgcatgtggttttggaccctgtagacctctcctttgcagaggcagagaccgtgcggtacgtgtactaccgcagcgacccggaccccgtagggagatggcggcgcgccacgtttcgcgtcttcttgcggccgttcgagctgctcacctatctgcgcgacgccggcctgacggtcgcgccgacctttcgggtggtttgccatcacgctttattcaccaccctggggatccgttgtgcggaacagaggctatcgggggctcagatgctatacctgcgtctggtctggaacgaggagcgttttcgcgattgggagtttttggtacgcgatctgctacgagaagagatgagcgtgtgtcagtcgaccgagccggcggatcggcccgatccctcgttgctcatgacggatgcgatgcttgagctggccaaaagcagctcaacaaccgctccgttttttgagatgccgtcttctggcacagggaacaacaacgcatcatcagcctccgctgctgacgagagcagccaggtagagcgtcgcgtgatacagtttctccgcggtgattccgagttaacttatcatgcgggacctttggaaccgccttcgaaaatccgagggcatgaaattgtgcaacctcgcatagaagtgaaccctgatgttatctacgcatcgggcccgcacgaagacgaccgcacgtctaaaacggacgagtggcagaagggtggtgtgctgcgactcggctccgtctgggatgtgcggcaacgtctgcgccttcacgtcctctggtacgcacaatctttttggaggtcgcgtggcctcaagtacgaagaccgcgaggaggatttgcggctgactctggactcgtatttcgatcgactctctgttgagtaccaactacttcgcgaggtgtatcgcgaaatcaaagcggtgctcaggtcggatcgcatggtggctcagaaattctcctgtcatctgtctatagaaacttcctggcttttaatttgggaactgtttgaccgggcgttagaactttggagggatcaggcggatgtcaacagctgcattattaaggcactagctcataagctgcgcagtaaagcacaatcgagccacgggaacagtgtttcggcaggtaaaacgaacccttcagagacctggtacgccgatgtggtgcgctgtgtgcgagcggaggtgaaccttggcgtagaagtgcatgtggagacgtgcagtcagagcggcttgtggctcgttcgcggtcgcgatggacacttgagaaagtggatcactcagccgcagacgtacgtgctgtacgccactccgggcctggtttttcactgggttctgcctggtggctttgccatttcctctcgagtgtgcctagatggcgtcgggagggatcacttcgaacgattccagatgtctgcgccagttcttacaaaaagaatgttgctggagacaggttggacgagggcagaagcatcgagagttccaagctgtggcctgtagatcggctattttttccccacccgggggcgatgccagttgcttggcgtgtcagctgttattgttcaaacgaggaggagaaaatctgatctgtttttcttgtaatggcaattacatggggacattttgctgtcctcgaatacagagagtgcgacaagatctcgtaggtttacacacaacgtacaaattagtgtttttgggacagctagggccggcacgtgttgattttgtaccggccttttcttctatgacgagcgtggtgccgcgatgttctattactccctccctcatgtacgaggtgtgtactctggtgcctccagaagaagctgagaagattcgagtgaaaggatgctcgggttcctacgaacctggagttgaaaaggccatcaatctcggtggagccggggcttggctggtgagcaatagcagcgggtacacgttgtatttttacatactgtgttttgatcttttcactgtatgcggcaatgatcaggaaatgccctctatggccagattgatggccttagcgaccgcttgcggacaagtgggttgcacctactgtaaggatcatggaggacacgtggatcctaccggttgttacataggccctgtgccagacaaggggaattgcttgtgttacacgttgtgtaattctcctactatgaacccaatcactaatgagaatcctgtagcattcttctgcgatgtggagagagcgagctatctgtgcgccgtgggctcaaaaaccaagagcaaagttacgctggcagatagcctggactatcatatcggtgccaagaatgaaaccggagactggctgccgctaaatgaaagtgcctggcagttggtgagggtggaagaacccgtttctcgaatgattgtgtgtgcctgcccggtactgaagaacttagtgcattaagaaaacaatacatgtttgattgacggggacatacttacgttggtgttataacagctggcgaagagcgccgtgctcttggcgcccttgtgatcgatgctgatgacaaagtctttgttttccacgacgtagtccttagcgaacgtgtggcggcagcgaaattccacctctttgagcacaaactgggacacgtgcttctggtgcgccacgtagccgatgctgatgccaatcatgtgcttgagcaagaagcagatgatggggatgatgaaccaggtcttgccgtgccgtcggggcacgagaaacaccgtggccttctgcttgaacacttccacggaagtctgtgacaggaagtcgatctcgaaggcgtggaccaaatattgcagtacgcgattggccagtacgggaatcttggtcaccgctataaaaaagataacgtgaatcaataaattcttttgaaatggctcgagtcgaatgggtttcgcgtcgccttccatggtggcaaagccgccatctagccacctcttgaagtccgtcataaagttgtttatctgtacaaactgggggtcgcgatacagctcggtcagggcgtcgagcttctgatacgactgcctctgatcttcgggacaggggagaaagttcaggttatccaaggccgtcttgaggttttcgtggaacaggagcgttcgcctgtcctcttccgagtggtagtcgcgatagcgaccgcaaaacgtcatcagggggaggaacgcctcgttacagcagtgtgccagtcccagttcggggtgcatcatttggtagcgcttacgacagagggcggccacattggtgaacgaggtagagatgcaagagctggggtgatttttgcgctttaggagctcttggtagcgctcctggatccgcgaagcggattccccgcgcagcatggccacgtatgtttctcccccctcggcggctgccgcctctccttctcctgctacaactactgcaactcctctttctttctcttcttcccctgtgtctgtagtaccggatggtgttccgccgcggtcggtgggattgacaactgcagccggtattgccgcttccacagcagtctccacgtcgttatgtgcggtggagcggatggtggaactttccacccagacaccagcagattttgaggtgcaggagacgctacgcttcgatgaggccgtaaatatggcgctagtggcctgcgaggctgtgtctccgtacgatcggtttcgtttaatcgaaactcccgatgagaatttcttattagtaaccaatgttatcccacgggaacccgccgaaatgcctgcagtcggggcagaggcggagcgtacgttctctacacgtcatcatgatgtgctggatggattttccaatctgtccgtgcctctaccaccaccttgtggagtgcgagattatgcattgcacaatgttgataggctgacctacgaaggcgaattggtctacgggagttatgtattgtaccgcaaaaatcacgtcgagctgtccctgtctagtaacaaggctcagtatgtggaggcggtattgaggaacgcctacacacctgggcttcttgatcatcacaacgtatgcgatatcgaggggttgctgtacctgttgtactgtggaccccgcagcttttgctcgcgggacacgtgtttcggtcgggaaaaacacgggtgtccctttccggccttgttgcccaagctcttttacgaacctgttcgcgattatatgacgtatatgaatctggcagaactttacgtgtatgtttggtatcgcggctatgattttccatcggcttcagattcgtcgtcgggaggtgatgacgacgaactgcgcttgcctttaaaggccgtctcgctcgatcgcctcaaagaggtgctgaaggctgtgcgtggacgcttcgtggggcgcgaggtccctacgtggcccgcctcgtcgcggacctgcctgctgtgcgcgctctatagtcagaaccgtctttgtttggatttggctagggacgaggccaaaacagtgcactatagcccgatcgtgatccaagactgtcccgcggccgtgaccgacgtcacacttagtcacattctgccgggacagaccgcggttaccctcttcccggtgtatcacgttgggaagctgttggacgcgctcacagaaacagaagctggggtcgtgtctctaaatctatgacgtcggccaataaaaacctcttgaaggaggcgatgcgcctgagtctcgagaaacaacagaatcagtttttgagacgcgtttacggagctcggcatcgcgtcacctctcatcactccttgcaactcatgcgagtggcggcacgtgagcaaactcggtatagtcaggcggtagttggacaggtaactgataacgtagttagggatcgcgaggatctcaaaagggagctccagcgtgctagggttttgcagaaggctgccgacgtcgacaacgctttggactctttaattgaattgaaggacacggtggaggacgtgcgtgacagctttgtagattccgtggctagcacctgtgaggtggatctgctggaggacgacgataccgagtaagaaatttgtgtctgtctatcatctttgtccgtttgtcctcacggctaaatttccatcatgtctacacggtccaaggccaaatcccggcctcggtcggcgtctgcagaatctggtcgcccgtggcagcctgcgcccctcagacgttccaaaacgtcgcagcgacgagcctggatgcgtcaggcggctatggctgcggcggtgcgagaaagtcaagcggcggcagcagcagcagcagcggctcctgctgcatcatcgacacgaaatgtcatgacagttcgcaagcgcaccactccgccttcccccgctgctatgctgccgcctcagtcgtcgtccagaggacgtaccacttcccggcaatctagtattgacggtcctgttttatacgcagcagacccacagttgcagtgctgtgaagattcgcactggtcttttgagtacgacgaggacgctccgacgcaaaatacaggaattgttcagccccgagcgcctttgcgctccataacctcttcggtacacgtaaatgatgagtatgacgcggcatcgagccaagtgtctcaggtgtcagtggacgaagaacacgaggatgtccattgtacctgctctaatgaacatgttattgctacctccatcaagggtttggtgtgtgatgcctctttgttttcacgaatgactcagccggaactgtgtgagatggcagtcacttatctcctagtgtatgtcccaaaggatgaaaacttttgcaaacgtgtgtgctattctgtagacatgactgatgccagtcgacgcatagggtgtggctcttttggagaaatctggccgatagatcgcaggcgcgtggttaagatagccagaaagcacactgaaaccattttgagtgcctacatgtcgggtctgatccgcactaaagcggggcctgaggccgaggagatgcctggtgtgtatcacggactgctgacagccacaggctgttgtctcatgcacaacctgacggtgtatcagcgtttccacagcgacctgtttcattttgagaactgggatctgacctcggttccgagctatcggcgcgccttccaccacttggctaatgctattaaatttctcaaccacacctgtaaagtgtgtcactttgacatttcacccatgaatgtgctgatcaatgtcaacccgcactaccacagcgagattctccatgtagcgctctgcgactacagcctcagtgagccttatcccgtgtgcaacgaccgttgcgtggtggtgtttcaagaaaccggtacggctcggcgcatccccaactgtacgcatcggttgcgcgagtgctatcaccctgcctttcgacccctccctctgcaaaaactgatgatctgcaatccccatgcacgttttcccgttagcaatagtccgcggcgcttttgtatgatcgaactggccgctctggggaacgtgttggccttttgcttggtacgactgttggatcgccggggaatagagggtgttcacaatggccctgagtcgctgctgttcaaacacgccgcgactgcctgtcacgcgttggaaaacaaccgcctgacggcttgctccgacgcctgtttactcattatggccgcgcagctgtcttatcacgccggcctgttgggcgacgacggccttgccgtcgtgagccagacggttggctttgtggaagccaagatgtcgtcctgtcgggtcagggctttcagacgttactatcacgagtgtctaggtgctttgccttttgattacgtcagaaataatctggaacggctactggccatggcggacggtgtgtatttatacaattcgttccgactggcggcgaacattagtaccgaggaggatttggacggcgattgtcggcagctctttagcgactaggtttgcggaggaggaacgctcggaaagcgggcctttccccaaccgcaagtatgtgggacgagacgggggatgagaacgaggacctggtacgattactatccctgcgggacgatgagcccttgagcatgtttatcatgaacactttcttgttgaaacaggagagttttcgcaatctatctttttccatcctgcgcctggcgtacgcctaccgcttgtttaccaaggcggctcggacctatgggctggcggtggccgaggagtttgtctccgcggtcgcggctctggcccaggacgagctgcttcgtgatattctcacgaatcggtacgtggagtctcgggaagagattcaccgttcgcttcagagggtggcccagtgccaagagcgagaggagctggtggacgaggtctctgacgactacgtgtggctgagcaaactgctagacttggctcccaattaccgtcagttggagctgtatcagattttagagagggagtcgcgaggccagtctcggaacatggtgtggcacctgttgcgtctggattcggtgtcggccaccaagttttacgaggcctttgtatttggatgcatgccaaatgcgctggcgcaacgctctcgagcgggggcgtcgcccggtatccagtttggtttacagcacgagggtgtggtcaagaccctggttgagttccacgtcatgcacggccgggaaccggtacgcgatggtcttggcctgctgattgaccctacctctggcctgatcggcgcctctatcgacctgtgctttggggtgtgcaagtctgatagcggagacgcgcggacgagcctgcacatatcgccctgcgccagtgtgtacgaaatcaagtgtcggtacaagtatcttcgcaagaagacggacccctttgtgcaaaacgtgctgcagcatgctgacgccgcgtcggtggccaagttcctactctcacatcccattcctggtgtggaatttcgtcacgatgccgatattccctcagggcgggaatttctgctgtcctacgacccccttttcaaggccaccctgaaacgcggacgcccgattaagcctccggaggctttgcgtgattacattcacgatttgctctacctgaacaaaacagaacgctcggaagtaattgttttcgacgccaaaaatctggatgagactattaacgctccgcattcccctgcggggcctgtggcggacgacgccgtggaaaccgagggcggctcgcagcgcagctttcacgatgaagacacccccgatctgctgggacagttgaccctttacgaggtttcgcgcttttccctgcccgtgtttgtcaatcctcgtcaccaatattactttcagctgcttatccagcagtatgtactgagccaatactatataaagaagcatccggatcctgagaggatcgattttcgagatttgcctaacgcacatttggtttcggctatcttccgcgagcgggacgagagcgaagtggggcgtccgctctatctgggcggtcgggtgttcagttgcgaccacattcctctgttgatcattgtcacacctgtggttctggatcccaaatttaccaggcatgtggtttctaccgttgtagatcgctggagtcgtgatctgtcgcggaaaacgaacctaccggtatgggtggccaatgctgcaaacgaatatgttgtttcttcggtgcctcgtccggcaagcccttaagagacaccatgggtagaccggtgtgccttcggtcttttgccgatatagataacacgtcgtcagaggaagatgaggcagatttgattagtataaactctgatcgactatcactagcttcgcaagactctatggcgccggctcccaaaccaaaaaagaaaaagaaaaaaacacaatcggcgcaacatactacccagaaagcacaactaactctggccttaatggaagatggggatggctaccattctcctcctcgtgtaacacggacatataatcgtccttcccctccttcgaaggcgaaaacacctcgcgctgaaaagatcgccatgcgtccccccacgccaaaaaaccagaggcgatcatcaagccgcggctcatatgagtctgtatattaagcgtccctgttttccccccagtacataataacatacaaaagcaaactttgggaactttttttctttggtttttgcatatcatctttaataaaatctttatgatacaattttacatgacttgagtccgagcagtctttgtaatgtcaagtttgctcctcagcggagactaagccatctcctccgcgtcggaggtggccatggaagcttctttgagagaagcaagttcgtctgtagcgggcaaatgcttatactttacactatgatgattgcggaaatagcgggtgcagcgacaggccgtaaaaccggcccagatgagaaaattaatggcgaaggccacagctacagatgaagtgtactcaggtgtgtaggctaactcatatttgataatgggatagattaaaccgcagagaccgcagaacgtaccgacatgaaacccaaactgcactttgacgtagcgataaaacactacttcgaggagcaggaagtaaatgattgagataaatgcaaacacgaaaaatacagccatgaccatgtgtccggtctggacgaaaaaattattaccgaatccgagacacagagacatggagattactgctatgttgaatcctagtagcatctgcactaagttaacaatgagagtgcggtactgaatggtgccttttagtttaggatgaattctttgcaaattaaacaaattctgcttaaagttttggtaattggtcactaggttaacattgtagatagttatacaaaaaaagtgtagacaggccataaacgcaatgacgctgggaaggcggaagctcatggcgagggtgaacaattcgaaggtatccatcaccatgatgaagatgaaggtggacaggctgtctcccatgtaggcgatgtctcgtgttcgctggttgagattcaaaccctcctctttgcggtagctgattttcatccagcagcagatatagtagataacaacacacaggaacacgatcatactaaaggcaacgtacatgataatctggatggtgtccaaaaacaacatgggagtagttaggtgcatcacgttgtagttgctcatgttcatctcagagtaatccaccacgttaaagtacgcacagggatagcccactcctgggatgttcatcatgacaacgtgtccatcgaggttgataaatgtaaaaactaccattaggacggagacgccccagatgcggctgttcatccagtccaccttggaggtcgccatggtgccgccgcggtggtggacgtcgaggcggtgccaggcgagtgcgtctcgatgacgaaaaaccggcgagtcgttaaatacttatggtgcgtgatgctccttgagtctgtggtcggcgaagtttccgcgcggcgaaactgcactactcctgcggatttcagccccgagggtacaacaccgcgtccgagatgtcagccggcacaaccttcacgggtgtcagctgtcatctcagctggtacgggatcattgaagacgcagtgccagtagttcagtgtttatttatacacattggccgcaacaatagcgagccgaagcttcagacgtttattctacgagctgatcccttgctggcagcggatctgcgagtcgtgcatcgaggcggttatgcaaacctggcggccacagctgacggtgaagagcgccagcagagtctggaccggcgtagctccgtgctggcacgcgtgctgctggaaggcagcgctcttattcgggtgttggctcacccgttcagtccggtgcaaattcgcaccgatcagcacgagctagagatcctggaagccgcgccggcgctagatatcgaggccgccgctgtgtcaaacgcactcagcctgttccatgtagctaaaatggtcattataggatcctaccctgagttgaccgaaccccgttcagttaccgtgggcgaggagcgtgtgagtgaggaatatgggacgcatgctaataaaaaaatgcgcagaggctactatgccttcgatgtcgccatgtcctttcgggttggcgctcataaatatgttttagaacgtgacgacgaggctctagtctcgcgtctgtttgagattcgagaagtttctttcctccgcacttgtttgcggattgtcacccccattggttttatagcggtagcggtgacagacgaacagtgttgtcttttattaaaatctgcctggacacgattatacgaagtactgtttcggggctttgcgggacaggctcccctatgcgactatctagggcctgacctttttgaagctgggggaagtcgctcttttttctttcctggctttccgcccgtccccgtgtaccccgttaacggtttagggtgcttattgcgggaaacggctctcgatgccgcgggcgaagtgatatcttggtgtggccttcctgatattgtggggtcgctgggaaaactggaaattcagcctagcacgctctcgctcggggttcccgaggatgagtggcgcgtgttcggcggagaggacaccgatcctctgcgcatcaacggaactgcgtttcgacaagccagcgagacgctctttagccatctatctacacgtgctggagagggagaattcctttcagctactgtgcatgctaaagattcgacccttcatcacctagtcatcgtaaacttggtggagtctgtagtggctaagtgtatcctagctcgagactttaataccgctctgcgctttaataatcgactccacaccaagaatgtttgcaaacagtttattgacaacctgcgatatcgatcaggtcgtgccttttggcagattcaaagtttactgggttacatatctcaacatgtaacgtctgcgtgcacttccgcgggtctgttctgggtcttatcgcgagggttttgtgaattttatgtttatgatggaaccatgcctcatggaccggtttctgccgagacgtgtgtgcggaccgtggtcgagtgttattggagaaagttgtttggagacgtgccaggtcctgtgtgtcggttgcaagccagtgctcctggcattatactgctttggggcggtatgcgtcttgtgagtcctttcggggttgacgagcaggacgactggtggtcggtggtgggtcaggtgttgggacgtttacccacattgtttcgaaagcggccaactgcacaggagttggagtctgtttaccgcgaagtgttgtttcgcttcgtgtctcgtcgcaacgatgtggatttctggctgctacgatgtgatccaggggaacacgaggtacgaccgcacgttggagtgattgactgcgctccgttctacggcgtttggtctgagcagagtgaaattattgtacaatctcgagattcggcgctggcggctgaagtaggttacacagtgtacctgaagagagcgtttgtgatgctaaccgcgtgcattgaagctatgagcgtatgtaacgtggcgctcgtagtgcctgcaacgaattcttcattgtcttcggcggtttggcctgggcctttggaggagcgggaagaatggctcagggcgctgagtggagaggcgcggcaggcggcggaacgcgtgattgccgaagggtcgcggtttttccggctcaatgtgtaattaacaagcacaaacagctgttcacaacatatttgggtcacatagaggtaggcttggaaagttggagttgagcacctcgattagagccacttcgactaacttgccgtttagggtttgacgttccattagtttcatagtaactttgtaagattcatcctggcgcgtgatgcggaaccaaaaccgcaagatggtgtggagaaatgactggcggctctcgtaaaacaaaataaacacttttggaacctgttctacgatttctgttgtcttatcgtcaaaaaacaggtacagggtactacagatgagtttttgacagctaatgcgtaacagtgtgctaaattggtctcggatgttaacgacctttaagtaccccagtaagtctagcagacactttctggtaagggttaagttctccacgcaagagagaatagtgcaaagcgtaaagtgcatcaggttactagtcctcacgatgccgcaacggtgtttcaaccgcatcgaggttagtttcacgtttttcattacgtcctcattttccaaaagaaaaatggtagagtagcccacgaatgaagatttgaggctcatttcgccgcggtactcggagatggagcacagcatgccatggtcggtgtgaacccacaatcgatcgttactcacggtgatgtccacgatttgtggggtggtcacgataacgttgcgactcgtttcatcagtatggacttccaataccccgcgcaccatcaggatgtccatgccgggaggatctgaaggggccgcctgcatcttgttgttggctcggacgttcagcgtctgaggaaggccgatggacaactggctgcctggtcatttggcggcgccttgccttttcgcggttgcagatgagttccacgtactgtcggaacttactgtcgtcataggcggccgcaacgatttctccaaaagacaagtggagatactcttcaggaatgggttcgagggtggacagggacagaacactgaacagatagggaatcaccacgcgctcgacagtgtagttggagtaaactatggcttcttcggcaccttgagcggtgactaggcgtttcattcggaaagtgcgaaagtattcgttttcccacagctcggtgagaaggttttcgagtttttccgtgttcggaataaattgcgaaaaaaagctgttggccaccacacggttgtcttctatcgctagcgggttgaaggccacttcttgcgccttgcgaaccgcttcggtgattgataggtggtgaagttttggctcacgttcaaacgtctgcgcggaccgctggcgcgcataccgagagaggagatcgcgcaattcccgcacccggctctcccacgcttgattcaagctttttaggtcttggatctcgtccacctgggcttgaatctgctcttccaagcattttatcatctgcttcttaaacagatcacgaatatcacggtcttgtgtggcgtttgttacgggaggtgcgctggcggacggtccgccgcctggggtacgggagggcatcaggcgactttggtccaccagggaaggggtcaggtcttggaggaaggattctacactgtcctcgatgccgatacgcgacttgctgtctgagacgttcaataaaaatttcataattgactttttggcgtcgctgccgcggtcgtgtttctccatcatgtccacgattctcttacagttcatctcatggcggcttgtggtcacggctttgacgggatacgtattgaggagctgacagatcttctgatggcggcacaggctgtcgtagcgcaggatttcttcgtgaaggtgggagattggagtggtaaagaacagctgatttcgctcgtacgccaagggttctgtcacaatgtatctgttgatggtccgttctttcagctgcgcttcgatcttctcggatttgatgcgcttgaatatgcgtaattcaggtgagttgacaatgcggacaccacacaggtgtgtgactacctgctgcaggagatgcagattgctgttgagtagatcttgggccagagggtgggtctccgtggacttgtggatggccgcacgaatgaaggccgcgcgttgcgcaatctcggcaggcttggacttgacatccatcagcgggatgatgcccaccgtgacgtaccagtccacgtagaggccgtagtcatcgttgtccgcgaattgatataaaatgtcacggagcgttccgaggactccggtctgcacgctctgtcgcacagaggcgctccacaccaagagatagttttccaagtcctcgtcgtctagagcttggtacggaaacagggtcgagtgaatcttccattcgtccgctacctgtcgcacggtaatagtatcaaagatcgttttacacagtccgtacagcagctgttttctcaatacacacggatcccggagaacctggtgaatgctcttgccgcggcacgtgccgataaagccgtgcaagagacgaatatagctcagtgtctgggcggtgggaaagatgtcgatgaccgtgtcgtcgtcgcgccccgttaagtacgaagatgctttgattctcaacctctcgtccgcggctaagatcgagcggatcgtcgacaaggtcaagtccctctccgatgttcgcttcgaaccggaggatttctcgtaccaatggttcaaatccatgagtcgtgtggaacggtccgcggatcaggacgttcgcgtgccctgcacagatcagtggcctttcttcccctttcggacgcttctggtgaccggcacggccggtgccggcaagacgtccagtattcaggtgctggccgcgaacctaaattgcgtcataaccgggaccaccgtaatcgccgcccagaacctcagcgcgattctcaaccgcacgcgctcggcgcaggtgaagacaatctatcgcgtatttggtttcaacagcaaacatgtgcctctggccgagggcggtaacgatattctgaagcagtaccggatctgcgagtcgcgcgacgaaaataccattcaacgtctgcaagtgaacgatctcttgacttactggccggtcattgccgacattatggaaaaatacttaaatatgttggaacgaaaggcgtctctggaagatgtttcggagatgtgcgagagtaatgtcattatcattgacgagtgcggcctgttgctcaggcacatgttgcaggtggtggtgtttttttactacttttacaacgccgtctgcaataccacgctctaccgcgagcggcgtgtgccctgcatcatttgtgtgggctctcccactcagacggaggctttagagagtcgctacgatcacatcactcagaacaaaaacattcgcaagggcattgacgtgctctcggccctcattcagaacaaagtgcttatggagtattgcgacatcgcaaataactgggtcatgttcatcaataacaagcgttgcacagatctagatttcagtgacctgctcaagtacatggagtttggcattcctctcaccgaggaacacataacatatgtagatcggttcgtaaaaccccctagttccattcggaacccgtcttacgcctctgacatgaccagattgtttctttcacatgtagaggtgcaggcatatttcaaaagattacacgaacagattcgtcagagcgaacggcatcgcttgtttgacctcccggtttattgcgtggttaacaaccgggcctatcaggagctctgcgatctgagtgacccgcttagcggttcgcctcagccggtggacatttggttccgccagaatttgacgcgcattatcaattactcccagtttgtagatcacaatctttctaacgaaatactcaaagagactttacgagcagaggacacggaggaagctttagaaactttattgacattgcgaatcacatacattcagggaagttcagtgggggtgaattcaaaggttcgggcatgtgttgtggggtaccacggcacttttgaacgttttgtagaaattttgcagaaggacacctttatcgagcgaacgccttgcgagcaggctgggtatgcgtactcactggtctcaggcctgctcttttctgccatgtatctcttctactcctcaccgtacacgaacgaggaggtattgcgagaattgggccggatcgatttaccgatcatttcttctctctgtgtggatgagaaaggtgtcagtgaggcgggcgtatcgtcgggaacgcatacccaaacacgggtagcggtaagcgggggcggtggggacgatgatgaagcaatggtgctggggatggatgaggatacttacgatattccttgtatgaacgaggaggtgtccgattccgatctcttggcgcagactagtctgtatgaggatccattctttggcaagtatgtcaaacctccgtctatcagtctcttgtcgttcgaagagacggtgcagatttacacgacctttcgcgacatctttcttaagcggtatcatattttgcaacgtgccaccggaggccggttcgccgccttgccgatggttacttacaatcgccgaaacgtggtggttaagtctaactgtcagatcgtctcgcagacgggctctttcgtaggtatgttgtcacacgtgtccccggcacagacgtatacgctcgagggttacacgaccgataacattttgagcttgcccggtggtcaccgcattcaccaagaggtggcacagcgaggactgtcacggctggtgctcaaggatgcgttaggctttctgtttgtgttggatgttaacgtgtcccgattcgtggagtccacacaaggtaagagtttgcatgtgtgtaccacggtggactacggcatcacgtcccgcacggcgatgaccatcgccaagagtcagggactttccctggaaaaggtggcggtggattttggcgatcatcccaaaaacctgaagatgagccacatctacgtggccatgtctcgggtgacggatccggagtatctggtgatgaacgtgaacccgctgcgcctgccgtacgagaagaacacgaccatcacgccgtacatctgccgcgcgctgaaggaccgaaggaccatgttgattttctagagaatgggcagggagacaaagaaaaaaaaaagacgcggagagggagccaccctgtctggcttgcattggttgtttagtggaagaggcaaaagcccggagggtggctccgatgggtctcattctgctccataatagttatttcagtatgcactggtaataaagatctgtgatcccgtgtggaagagagagaggataataaaacatgtattgaaaacttgccaacggctatgtgatctttctcacgtagcagaacagggagagacctttgtactaattttattgtttttgtgtttttttttttcaaagaatgagatgctctcttaagagctgagctgttaacggatgtggtgatacattaataagtatttccttaacagaaaaaaaatgtttcataaatgagaggagagaagtatgaggtgtttttctttaacgcaataaatcacagttaggaagcgtagcgtttggcgtgcatcctttgtcttttatgcaactgaaactatccgataggcagagacgaagcgagtctagaaagctcgttcagatcgttcgtggcctgaggttttttatttttgcggcggcgcgccagcagcggcgcctcttctgaagcgattcgtgtatatagcgtgcggtctgctaatcatatagaccaattgacatggatatccagcttttgatacgggttattatcgtttgttatggaagcttttgaacttcatgattaaggataaaggggcctagcaaaaaaagtttttctcctaagagcaatttttcttaagagctatatatcatggtaaattcagaatcctatggtgtctttttttatctccaagagaaaaaaatcaacattatggtctaacttacgatgatcctttggtcactgctgaccaacacctacagttctttttttgtacgaatcctaaagtacaatattgttcgttctcaagtaactaacttatctgctatgttttgtttttctttttttttccgtatacgtgaggattattacccgcctgcaaggcgcaagcaactctgggctagatgacacagagaactcacatgagcttggcttgcatgacaaagacatctccctcgatggggatggcgcaacttactttaaatgggcttatggttacaatacaaaaagagagaaaaggaaacttaactgagacgactctataatttgtaccttattgtgactatatactacgtgattacttgtatataacaataatgatatatgaaaaaagtagcaacaagagacaagaaacagcttaatcaccctgaccagacagaccatcaggaaattatatatatcttgagacggccaagaaggacttgagtaacggcggccaaaaatgaactcatcattcagggctgcggcctaaacgtttgtgatgatgatagtcgatatacattgttaaatcattcatggttgtgttgactagatgatacagatgaatgtacacagctaggtgagacttacagctatccatccatttttcgttgtgattagctgagagattagacgtttatttatcactatggtatgtgcactatggagtagccctataggaattggggagcagggtgtttatcgctatggctcttttatcactacggttgtcactaatgatttcctagggagcggagacacaagaacttaaactatttatatacctaaatgatagcttagctgttaactctaaaattgtcactataccttattgtcctatggtcactatgagaatatcaacaaaaaaaggtaaaactttataacacgcaaacaacaaaagaaagattagcttattgttaaacaactatacggcctatacatacataacaacaaatatatagctatgatgatggttatatcacgcaggcttgtctatcgcttggcggttactgggatggaaacgaaaacaagagagaagcaagttcatcgcggaccggccgcgaggcgcataaaaaagcgtagcggttgcaaactctgtgcattggttcttgttgtgggttgagatgcccagcagcacggccagactcctcgatcgcgaaccggcgctcaccggggagttcggtcgggggaccctgtagttgttgttcgttttgatgcttgattagatatcctgttggtgaggggaggtggcaggctgagttttttgcaaggttagccttcttctaccccctacacatgcgtacttgtttcttgagttaagtgtttgttttttttttcttaatagttatcgttacaagtctggcttgattgttcagggggggttgcatctttttagtgagtgtgataccacgacgtagggtgtggtaaccgtaacaataatatctgttggttaggagaacttaaatgtgtattaggtattattctcttatgctgctaacagaattgcttctccgtaactattatcgtcttacagatagattgcgtttgtttttttttttcaagttccccagcaaaaacagggagtctgtggctttttggttcgtgtacatccgtgttcgcgtatcgaatttgatcttcctgcgatgatgtagggtccttgatgtaggatttcgaatatcggtattttttcttttagcaaagtgagggttcgtgtaagtttctatacaaacttatgtgaagtttatgacgttcgtttgttatctcgagagcggctcgaaccttcttctgtagagctttatttagtgcaactttacggggtgtagaagctaaatgaatctctgaaggtgctactcatttacacttcgaagaaacatccagttcgtgaaaaaaacaagtgtcttcgaaatcatgtttccactatttttgcaattacatctgtgaaagtaggcagtagataccagattcttttttatttttgtttgtctcttatacaatggactacgatgtttctcgagagtatgtcgtaagcttgtccgtggtgtagatcgagttgctattgttatttccttttgcacacacagttgtttcaattagatgtttgaccgtgattttgcccacccggcccgggagacaaggcaaggagatttgttttttgcgtttgccatttatcatcgttatttactattagtggtgacaatgacctgtcagattgttgattattttttgggctacagactataaatcttcaaggatcgaggaaaagcaaacaaataggaaaggaaaaaagggaccaccttacctgtggcgtctcattctctgttgcagcggcggtcggtgctgttgtttagcctggagaaggagacgagaacgacgaatcggcggttacaatgcggaggaggaggaggtctttcggcatcatcgtcgccggcgctatcggaacactactcatgatggcggtggtcgtgctttcagcccatgaccatgaacacaaagaagtaccaccggcctgtgaccccgttcacggtaacttggcaggcatcttcaaggagttgcgggcgacctacgcttccattagagaaggtttggtatgttaggcaacgcagttctcggatgtcagtccggatcggaggagtcacagtctgtcatgtgatgatatattgcttaatttttgttttgcagcaaaagaaggacacggtgtactacacatcgctgttcaatgaccgcgtgctccatgaaatgctgagtcctatgggctgtcgcgtgaccaatgaactcatggaacattatttagatggtgttctgcctcgagcaagtcatttagactacgataatagcactctgaatggcttacatgtgtttgcttcatccatgcaggcgctgtatcagcacatgttaaagtgtgtaagtgtttcaggttcgataaccccgcgatatgacacgtaaatagcgatatcgtggcaccagacgtcagtcacagtcttccccggtcgagacgcatcttatatcgcgatatatcgcggattatcgcagtatgtagcgatatatcgtgtcaaagcactccgaacgacattctgatgacggctatcgccttatgtcgcggtatatcgcggaatatcgcagtatatcgcggttatgtcgcgacataaccgtcatgtcgcgactatcgccgcatatcgccactatcgcgacttggcaccgtgccaacgatagtcgaccttagggtggtcgtgtggtggtggggggctgcttgcggtttgcaaaccggagaggtagcacacgctgattgtcggtttggaagcgttgtttacacatgtctttgtcttggcagcccgcgttggcatgtactggcaaaacgccagcttggatgtacttcttggaggtggaacacaaggtcagttaaggttgccaggtaggttaaaacgcagaaaccattgttctaccggtttcctaaaacgccgttcaacgtgttttgcagctcaacccctggaggggcacggcaaaagccgcggccgaggctgaccttttgctgaactacttggaaacgttcctgctgcagttctgagccagctgtcaatcaaggcagccaaaagcagcgttctccggtttacaattctcggatcgtttcgctagttaagctctaataaacgtactgtttaaccacgttgcgtcgtgacgttgtttatgagtgtcacggggtgggagtgtatcatgttgtataaatagcgagagcgactcgcggcagctctctcaagctgcctacgcgcgtataactgcttgccgagcggccctggatagcctgcaaccatggaagaaaccacgtcaacgcgcacttattggactttcaggggcgtttctcgcgtgcttcatcagtctgtgaatacgggtttcgatgtgcggcagtcttcttttgagagtgccacgctcgtccggtgcctggacggtgagggcaccacgactgcgctcggcaaagggtggctgtgttgtaccgtggtgcaacacggagatggaaatgctcctaaaggacagccgcaacagggatttatgtctttggacgttactgtggaggacattttggataatttgtttgtgcgtggcatggtggtgaataacaagaacgtttcttctgtggtgggccaaggaaaaagtggtgacagttcgttgttaactgtgatatctgaaccagacacgctccaagtgacttttatcagacatcatactaaattttcggactccattgcacaagcatcatcttctggtgcttcattgtcctccggcattccatcttcctcatcctccgtttctgcctctgttccatcaacggccgctttggaggagagacgggcccgtgccgagcggcatgaacgcaaaaagcaccaacatcagcaacaacagcagcagcaggctaactctgtgcaggatggcgctggacagatgcgggtgtctgggggaggtgaccgtgatccgcgcgtcttgaatcggcccaaagaccgccggtccgagacggacggtaagtcgggccgttccgcgtccgcggatggtgctggcggtgcggagtctcatagcagtgggggtgtgtggcactatacaggcgggtcacatcattaatttcgttttcgtgcggtgttcgtctaggctctcctttagacaaaaggccaaagacgcaccacgagccgaagactgcggcggaacataccccgcgtcatatgcctatggaacataaccccacatctgaccctgttggtttcttaaattattcttcgcacgctccattgacggaccatcccggtagcgacggtgcgttattacaaaatgagacagctgggtttggcgacgccgaggagcgccctgaggagcttggctccagggcgccttctcccgcacgtgggaatagcgggaccgaggcgggagctgatgctggggtcagggcgtccactagtgctaccgatgatggtggtgatgatgagcatgtaacgccctctacttcttcgggactgtctaaccgccatcttcctccgaattcgcaggcctcatccgcgccactctcacctcatcctcgcagcccccattttgaggacattatacaatcgctcaccaggttaattaatgagtgtggtaagggagatcgggttgatactcctgctccctccagacgcacgcccgagtgcagtgactctcatgccagtcctgctgccaccagtactgctgctaccgccgctgccgccacaaccgtccctgtgtgtgaggctccccgacccgtatgcgagattcgaccctatatggtaaacaccgctgctgcccctcagcctccgccagagcctcagcagccggccgctaacagacggactcgaggaggggctcggccccgcaacggttcccgtggaggaggcggcgggcgacgaggggcttccacctcgggtcgtaggcgacggcgcaatcaggatgatgaatctgaggacgagattttgccgggccccagccggaggagaagcgtaccgccttccttcgcggaagatggacttgaaattattgatctcgctgaggaggcagctttggcggctgcttccatcgcgtccttttttgactgactttttaaatgaccagatattgaaataacacactgaacgcgtgtatatatgtatataataaagtatattattgttgtattttatacagttattgtttgtaataaagaatatggttataaacgccagtcaattgttttctcgtgatgtttgcgaagatattcgttagctaagacaaagtgttcgttgccgaggaaagacttggtgttcttgggtgaagggtgccaggctttaaggatgaggtgacggcttttattgatcaggcattctagggtctgggcttcagcgccccagagcatgaacaccaagtgctcacggcactctgacagtctggagatcactcgctcgctcaacacttgccagcccaagtggcggtgcgagcctggctggccgcgaaccaccgtgaacactgtgttgagcagcagcacgcctcggcggcaccagtcgtctatgcatccgccgatgggtctctggaagccggccacggtgcgacacagttcgcggtacacattttgcagcgagggcggcgcgacctgcccgggcagggtgccgaacgccaccccgctggcgctcccgtcacagtagggatcctgacccacaatcaccacgtacacattatcaggcgcacacaagtaactccagcggtgcacgtgctcgggcggcgggtacacagtatcgctctgacgagcgcgcgcaacagcatccaccgtatctcgtagcaagtctaagtcatgggatggtatattcagaaagactagccattccttactaacagacaagaggcgagtctgctcgtcatggttaagcatacaagctttattatcaggaatgttttccaacatccactgctttaaggccattatgtagtaaagcggggttgtttgttagcggctgtttccactcgtctgggatatcaaggtagtatttatccaagcggtcgatcaaggcggtatcaaggtcgtgacgtacgagaagctctctcacgaggttatacagagcatagaacagctgaagtccattacgatccgctcgagtggccacgggaatgcggacagggcgatgcatttttatgtcttcatgacgcacgacaacgagagcggcaaattgtcctttgtgaccaaagtcaaacccgagtacattctcggtaaagatgctgttgctatatgtgagatatcgaaggtcgtacgcgcggcacacattatctacacacgtgtagatagacccggtgtctccacactcactgtagccttgcataatcttcatccaagtcggtgcaccatcggatttcagaagggttaacagagttcgcagctgagcggggttattgtgtagcagagccacaaagtccatgaaggtgtcgtccaagggtattgtggacgcagcatgtttagtgaggggagtgtagcgaagaagttgcgagaggttgccatcgggatgatttacttttattaaaggcttggcccagctatcatcctcgggtgaaaacgtttccccagtaaagcatcgacgggtcagttcgagacaagtgaggttctggggtaaggtctcggcaaacacgagcgtaaccaaaacagcagcactcaccagtagtctccacatcggttgtctcttactcagtagtataccagtctcgatactctatctgtccttgcaggattatagggtgatagcgccctagttgatttaggaagtccgagttaacgtctggtaaccctaaaagtttatatattgcgtctaccaggttggaggtagccgatgcactaactaccaagctgtcgttaccaattttgatgatggctaacggcttatgacagggagtcaacgttggaggaaagaatgaaacgctggtcactgttgaccaggagttaactgacttgttagtatagtcacatgaggttatattctggtatgtgtcattgcggtcgcaagtggcctgaaagtaaatggtgtcttcagtatcgtatgtcagagtataacccggtgattgagggaaatatgtatcttcttctgaattggtttcaggttcctcattactatattcactagactcattaatatcgtcttcctctccggggtctttgaatacaatggaaatagtctcattgcacaagtccacaatctgcagaggttcatacggacttggggtggtaatgttaattgtaacgttttcatatccagtggagttgtaaggttctgtggtagttacattcatgtcagctgtggtgtttggtaaactagttgtgtttgttttaggagttgtagagttagtaccattaacagtggatgtagtactagtagtggtagacgtgttactagcaggactgctaaccgtagggctgctaacattagtgggtttagtacttgtgctggtagtgttggcgggacttgaggtgaccgatgtgctgctcttgggtgtggttgctgatgcggtgccagtggttgttattgttgtgttggtgctggaagtggacgatttgggtgatgggctcgatgtagtggtattcgtggtagctgggctggaagctggtgagggggttgacatattggtggtagaggcggttgttacggtgctggtgatcgtggaagcggtgggggtgctggtattgcctgcggtggtgctgctggccttggcgctcgtggcgacgatcaacagcagccacctcattgccagccatcgcatgcctgtggctggaactctgtgaaataattgtataacggcaggtgcggtgccgcgatcgacggatatgacagggcacaaatattgatattaaatatgtctggctgcttttcggccaccgccgcgcagagcgtcgccgcattaatcagatcctttttcgtggcgcctgacacgtacagctggtgtactccggtttcgtggtacgacacggctctggggattaccgatcgtacggtatcaagcacgttgtcggagctgttgtggcaatacttgaaggcggccacggcctgcggggtgtgcgggactgtttgtgtaatgatctgggatccggacaggacggtgatgttgtgcaatttcaacagcgtggtcttaaggttctgaaaggcgttgccacacgcggcgctgacttggatttggatggcggtggaatcatacacacggctgactcgagacagttcctcaaaaatgtatctgtactttattacacagctaggggcaaagcggtaatcgttgggtagcaggtaaggcgtggcattcaggtcggtggtttcgcgatcggtctccagcaggacgcggtggttcattaggtctatagttggtatggaggtggtttcactcgacgcggtagaggttgaaggggagggctcgggtgaagacgatggtgacaaggacaaggacaggtcgtcaatgtacatgtcatcgttgctactgttgttggccacagacacatcacgttgaaaagtgtccgccaagaagtcgtctatgacatcttgatccatcttcttgccggacccgctggacgcgtgactatcctcggctgcgggcgaagtcgtgttaaagacgatgagccgcttgcgctgctttacatctctggcatacctgcgaatcagtgaagtgccgtacgggtagagactctttgtgagcttaggtggtgttggtggctggcgcgcatcgtacgagggtgggggatggatgatcctaacatggttcacgtcttggttgtccggagggatccgcagaaagcgctgctgtggcaccactacaatggttcggtgtgtctttctcttattagcaggagcgagggacttggagacgcgttgggaggtgtacacgatgttaatgttggagaacatcgcggacggccttttgagtctggattaccactgcttaaagtaaggcacggggtagggcttttcttcgtccagccgtctgtacgcccatggatttcgttggcgcatgagaacgtaagtgatgtacagaagggcaaatagcatgaagaggaggaaggccaagacgatatagcccagtgttccgatgattggccattcatctggatcgcgttttatgaacacgtgcgtagatacactgtagcggtctcccaaaagaattttcatgtgagccgtattggggagatcatgattggtaaagtgaaagatgtactcccacaaactctggttgtgtctggtgatgttttggactttatgtgaggagtggttcgtgtttccaaagtacacaaaagccttgctgctggaatacacggtttcatttgtgcatgggtgatcattcacaagtacacggagctggatcatgctgtcgtttgttggagaggcgaatacagctttgattggcatgactaggaattcccagctcttattaagagtttgtcccgttgcaatgaatctgcaactgtactgtgtggtcacgttaggtgcctgtctgtacatggtaaaagtttgcgtggtgatgttgtataacattccatgagctgtaataacgatgaattgattaatcacacatcttaaaaatatacatataacaaatagatatagaatgtttctacttacatgtgttgctggtggttactgatccaatgctggtaaggttgccatcgcatccaacttgttcaaagcactctatagatatcaggtctcttgatacattctgagcatgtgacatgttgtgaatttgacatgtagtctgcagtactaggtagttgtagctgtaggcactttcacatgtaacatagatatcaggtactcgaggtttgtttgctgtggtgctggttgcagctgtgctggtgtcgctggtggtatcagcggtggtagtgacggtgctattctcagtagtagaattatcggaggcattgctggaggttgttgctgactctgtcgttgctggggctgttgttgtgttgctactggtggtttgagtaccggtatcagttgaactgttgctagtagatgttttctgagtactagtagcggttgatgttgcggtacccgatgtgctgctagatgctgcattggaactggtcacagatgatgctgctgcactagaactggttagagacgtggtaaccgaggtagctgaactggtcacagtcgaagtagatggagcggttgtagtagatgtggtattcgcagctgttgtggtactggtgccaccgatcacttgctgagcgatgagcacggcggccgcgagggccagaacgtgcccggtgccaagcattgttgtctgacaatagactttgacagctctatatgtacatccaccacgtcagttgtgacgcttgaacttacagctccatataaggcatgcgttaataataaagactacgaatactagttgcgctaacagaacaatcatcacaactcggttctgctgacttcgaggccaccagttcagagctgcatctggagtttctaccaaatctgtatcgttgaccagtactattgcatccttattagaagtattagtaatttttgtaaccataaaagagcggaccccataagtaccattggacccccaacaagttactgtactattcagatagaatccataaggtgcagtatccaacacctttacaaattgtaaataaaagggttttgggtgtctggtatactcataatatccacctttaaggaaagtagtgttgtggttggttgttatcataatcccacccgctaggaacctagagtatctggctgaggtgttacaataaatagttaagttactagcattataataaatataagccaccttcacatggggggcaaaaggatcacctgaataaaagggaaggctatataccaccgtcataataatcaccatgcacactatacccagataaatagcgtggtaaaaacgtaacatcttaccacctcttcaccgctggttcaaagtaccgtgtgcgccttgacagccatgatttatagtcagtcaagtgacgtgtagtatcatagtctaacttcaagatgcctgcaatcattacacccactgtcagcagcacgcacacacagtaccacagggacaggtctgaatcccacccgcagggattcaggtatctcttcttgggtacaaccccaacgcacaatacaccttcacggtcctcatccatcttcagcaacagacctacagttgtcatgggataagggggcatcctcaggatcacagcagactccgaagaccacaaggacccacggacctccactcggtatggtactgataatggcgtctgactatcataatcaaaagcccataccctcttggtgtcgttcataaaccaataaagtctggtatcaagttgcctcaataaacacttgactttcatgtggttcctatcccaacacatgtctggggtctgcacaccacagacactgaccaccacacttgttaaaagaacaatagctaaacctagcaacatgatgatcacaccaggacacaggtatacaaatgagcacaattttattgcatacaatcttatttatatacatctgaacactgattaggtaatgctaatgagatgatatggagaatactgatatggatatgtaatgtaacactgcagggtatgctatcatctatgtacaaggtcaggggcacgtcctccaagtccattagtcacagtccactgtttattaactgttcagtgcaatgttaagtccactgtgcagttcactgggatgattcctggttcatgtcctcgatggctttctcaatggccatgctcaggttggccaagtcttcatccttggtttcctcgaactggcccactgcatacatcttagctgcctgatcataaatgggcagcatgaaggaattggagttttcattagtgaagatcctgatggccacctgcttggggaatctctgcacaaggggcaccaagacttgcaaggatcccaagaagtccacgggggtagctgcgtgaacaatcatgttgcggtagtctgaagaccgagggcacatatcgtgtggctgcacggctttcagatcccaggcctgcttgattccactggcacaagcctctgcagtcttgcggaccacttctgcaggatacacgttaggcatggtgtgttccaccaggaagggggtagagatgctcaggttggggatcttcccaagtctcactctagccacatccactgcttccttcacctcatgggttcgggtgtaggtcaccatgatacccctgtggttcacctgcatggtcttgcatgcattcacagcttcagccatcagctgatgtacattagtagtcaggaaggggaggttcttgtactccagtgacctggtggtcgctctgaacatacgggacacttcatctgcccttactctcccacgcttggtctccacggtggggttcttgaagacagttccagccttctccttcatagcacttctcaccctctcacagtccaggggggtgagcctcttggtgctcttggttctgggagccttgggggtcttgcccttggaagtgctaggtatcatgggggctggtggaggtgtgtggatgggggatactggggatgtgatggtactggcagaggagaagtggtcacctgcacactcatcacagcactcagagtcactgcttgaggaagaggaactatccataggtatttgaccagatgccccggacatcttagtggttattttcagttgtacaccttgctgttcacttgtggcacgtgcagacaccccaggctcagtgtcttcctcctcttcactgtctgagatcacaatacatccagaggtgggttggatgtcttggcccttgtacctgatgaaagactcaccctcctgcttaatctctgatggctttagcatgcacgtgggaggtgagggtggtttaataatgaccttcatggggtgttgggtcttacgtgatttctttcgctgactcatactgtcagtgggtttgcaaacagctggcttggtgctactggtgctgccgctggtggtggtggaggaagatggtgctggggctgctattgctgctgagggtggtgctgggatcttgggcttggacttgggtttgggggtgccctgaagactggcagtgatttgcataccaggaacttggatggcagtggtggtgggagcaatggtgggagcagtggtggtgatcatacttgatgggatgggggcagtcactcctgctgagctagagtcaatccctgcttgactgacagcttgggccaagatgtcaagaggtgttggaggtggtggacctaagttaaagaatacacaggacacacttagtgcttttgtaaacagggacacatttattgatccacaacacaagtacactacaacatcttcccaacttgggttcttctcttactggggtctcccacctaagttcccacacttggttcccacaataatgaggcatacaccaagtatatagtgttatatctggagtatatattgtataacatagagtataatataaagtataacatagagtataacatggtttcaataatacaattagtacagtcagttaatccagttatatgccagggggttacagtacagttagtacatcattgggggcctgactacctggggacttacaatatcagagtacaatatcaggcataaatgcagttatagggaccagcccatataactgtacagagtttaactctttacttgtcagtcttgcttctggtctgcatatggtgcttgctcttagaagagggtccagcaccttcctcttccttaatatgaggcttggcatacttaatgacagtcatctgcaagtcctctgactcctcatctccttcctcagtctcctgaggagtctcaacttcagtctctccctcagtctgctctatctgagtctcactctctgccttaggctgtgcctcagaccctatctgagtctcactctcagtgccctcaatgtctgtatcatctgtcccttcatctgtctcctcagcctgagtctctgttccctcatctcctgtctcagtctcctgttcctcatcatctgcctcactctcttgttcttcctctgtgtcagagtgaattatcacagaggccagtgggatgtcagtaccaggcacattctctgggagcacaccagaaacaactgggaacctatcctcattgatcttatcattaacaatctctctaagctcattaaggctgtagaacttcatcttatctatgcccatcatcagggtggcatggaactcattaataacaattctaactttgggcttcagaccatctataagttcatcattgctctggttagagttggtatggatagcatggacaatttcatcaatcagatacagtattagcactctaacctggtctgatagcatggtaatgggagtgtgcatacccagcatagcttcatcatttttctgatgaccttccttatataaggccatacccaaagtagttaccagatgggtaaaattgttcacatggaaagcaacctctttctgttccttatccagtttcttaatcagttccaagccatcatgatttgcatctgtcaggtcatcataattagatagttgtttcaaaaatagtttggcatgctcctcattattgatggctttagggccaccagtaccctgcatggccatgagaaggtacttcatgcaggtgtatgtaactctgtctttgatatcatctttctttgttttaatctttaacataacgaatttctccagtttgctggatgagttaactgcatactgaactatctgtttgaggcacaccatgaatttttccttatactgaggaggcacaggagtgtcattaaactgttcattagcaacctcaaataagcatctcatgtcttggaagggggttttaagtttatccagaagcaaataactgttctgtattccctgttctagcttttcaaatttgtctgagaacacttttctaatatcagtaagttgttctctgatgatctcatctgcaagtcttctgtttctttggactctgagcttaatctgtgtcactgttaaaaaaataaaatagtgataagtatatgtagtgtgaatgtggtgcaagacaaataaagacacaggacacagactacatacttaccaacgagctgatgagctccaactacatcatccccttcttggatgatttcttcaagggtttttattggatcatcattagctgattcaaacagagggtcccccaggttgaattcagtcagcttcttttcttcatctgcaagcatcttctccagcaggtcaacagcgtgctgcagagccatgtccttcctggtaacacaacaaagtaaatggacatgagacttgggtttatgtagggaaaaactttattaagtattgtatgtgcatggagaatcaagtgttcagcataatatacctacttggcctgctttggtggagaaggcccagtagaaggtcctccagaagtcccctcctctggatcaccagcttccccagtatgggtctcatcctcaggctttctcttcctggaatccatggttacaggtgtctattggaatatgagagagagactaagtatctactgcatttgcctctacctggtggcccaagctacatttatattatcatcagcctcccccaccgggacttcattatcatcaacaacaaaggggagtgggactgaaccccttacctcctctgctacaaagctgattactgctcaacctgggtctgctgttgctgttgtattggctgcccaatacaaggctgaatctgcatcatcatcatcggtgatactacccacggtgctggccgccagtggcatggtggtgcttgtgatactgttgattggacttaacctgagctcaaccttctggagccaacaggtggatgaagagagcgagctggaagagggccccagccgtctacatacggacaccacctttataagtgcttctacagtggatttatgtgcttaaacagtgttagaataaagacctgcagacaaaataaggtgttgtatgcctttattaacaatttggcatggagccaaaatttcagatctggcggacagccagttggctcagatccaatatttggaaacatgccaaagaacaccgtcaccatttggcaaagggccaggaatagcgtcaccacctggcaaggagccatgcactgcgtcatcaattggcatagggccatggtgggcatagggccaatagcaccgtcaccatagggcatagggccaagatatagataagcaccgtcaccaataagggggcagggccaatagcaagcaccgtcaccaataggggcgttcccattaatcaatagcaccgccccttatgggggttgggctataggaccctcctcccatatatagcatgcattatataggctccaccccctttatatagacgcctataggccatatatggcgttggcttattgccatatgacgtaatggcgccattacgtcatatatagcctatagattctataggccccatttacttacattacttggcacggtgtatccgcgttccaatgcacccttcccggctatggaggctggatcggtcccggtaccttctatggtgctcctccgacgtccccaggcagaatggcggttccctaaacgtgcattgcttatatagaccgcccaatagggcacgcctaccgcccattaacgtcataggaccgccccattgacgtcaatgggcatgtacttggcagccattgcgggccatttaccgccattgacgtcaatgggagtactgccaatgtaccttggtgtactgccaagtacccatttacttgccaagttactattaataggtattgatgtactgccaagtgggccatttaccgtcattgacgtcaatagggggcgtgggaatgggcaatgggccaccccattgacgtcaatgggaggtgggcctattgacgtcaatggggtggtcctatacacgtcaatgggcggtattaatgacgtatattaatccctcccattgacgtcaatggaggcgtatccatattacgtcaatgggcggtccatatgacgtatataggaaggcccatatatggtattggtaatggacataagccaatatggctataggccaatatggacatatgccaatatggattattgcctatatattggctataatcaatactggcccattgccatgttggccaatggccatattggcttatggccattctattgaacctggctattagccatattggatattggctatatggatcaataacattggacacatgccaatccaatatgtcggacttggcaccatgccaagaccccaccccaaacttggcacggtgccaagtcgaccacccctcaattggcatggtgccaagtttttttggctcaatgccaggtccgccatattgaattggatggatgccagaacctccattttttattggcttgatgcccaggtctgccatattgttttggctgggtgcccaggcagccatattgaattggcatgagtccatagacgccatattgttttggagctattccaattcaatatggcgtttatggacgcatgccaattcaacatggccgatctggacaccggccaaaacaatatggctgacctggcacacagccaagaccgccatttgcaattggcaccgagccaaaatttcttggcaccgtgccaggtcggacattttgatttggcgccgtgccaagaaattttggcaagttgccaagtttcgattttacttggcatggtgccaaaatcccgattttgctttttcggattccccgacgctcggggaacacattgcgcgacatttggaggtcctccgatcgatggtttttcagataacccgggggtatgtttttgaaaagtctggcaaaatgccaagttttcagatattgaaaatgcgtcttttgcgccttctctcgatccaattttttctacttttttgatccgttgaacggccaaaatcacatcattttccaagcaattgcgcctgtctctcagaccaattttgcccgagttttcaagccaatttgacccgtctctcagactaattagacccgtctctcagactaatttgacccgtctctcagactaatttgacccgtctctcagactaatttgacccgtctctcagactaatttgacccgtctctcagactaatttgacccgtctctcagactaatttgacccgtctctcagactaatttgacccgtctctcagactaatttgacccgtctctcagactaatttgacccgtctctcagactaatttgacccgtctctcagactaatttgacccgtctctcagactaatttgacccgtctctcagactaatttgacccgtctctcagactaatttgacccgtctctcagactaatttgacccgtctctcagaccaatttgacccgtctctcagaccaatttgactcgacttttcaagccaattttacccgtctctcagaccaattttgcccaacttttcaagccaattttactcgtctcttagaccaaatctacccgtctctcagaccaattttacccgacttttcaagccaattctacccgtctctcaagccaattccacccatctctcagaccaattttatccgactctcaggccaatttttgcctgtctttcatgccaatttttcaacaaaaacacacgaaaaatatactggttttataaattacttttttgttgtaactaaattagttgtgttgtctttcttctacttatagcaatgcgcgtactctcaaacgaaatgaatacttttcgtgttactattgctacaatgctactcatatgccttatactatcagagttttcaggttcacagggttcggaattacgttgcagttgtgttaaatattattctggtataccatggacagcaacatgtgtttatctaaagcctaaaagtattgaatgcaataattatgaactaatagtatatgatggatcaccacataaaacttgtgtgcgtgttcgtaacccgtcggtgtttgatagattggataagcaaacatggtttacagtaaccaaaaaacccaacagacacataagtttgaagccgcagcgtacttcgtgtgctgtaccgaaatcatgaaactgcaagattacagagtgtaaaagacggcatgttatctacggtacgatatgacatttggtggtacatttatgataatgaagtgtttcgttttacaactacattcacttagtattatattgtatatacttttattaaaatgtataataattcatagcggtactaaaacagaattttgtgaatgtgctaacgtcacattgtttacatccatccccaatggcaccctttatctacaaccactaccccctaacgaaaattgcaccaaacaagaagtgattgctgtgctcccaaacaacactcgaacctgcttgaatccccatgctctggtagttagagttttctttaacagacttttcttacgaatcagtaagaacgaagaagggctctatgaagtagttgacactcagcttgaactacccgcctggaacataaccagaaaatactataagcgatatttgcaaaaaaaggttaattccgaaaacgcaaagatcctaagccgcatgatattatgaagaccactatgctttactttatttgtttactttccatgtcccacgcctcagacgtctgtcaagctggcccttcagactcctcgtccgtgacgacatcatgcactacttctataaactcaagcggctgtctggcatatgtagtcttctgccttatggtcgtttggttgtttctcacctattgcttggtactctagcttcagtaagatggcctacaacagcttccttctcagctgccttaccatcgcacttttactgcacggtcttccaacatcaactagcgctaaagacatggcaggctacgtacacgttcatatgcttaacgcacctgaagacgccgcttctacgtctgcgccagttatccaactagccaacggctttattacctgcagaaaatttacagagctcggttgggcactgtgtactagctgggatgatatggagtgttttccgttttggcgaaggactttctcggaaactaaaaatatcactgtgctttcagacgatccatactatgccggcgttgtgttgacagtacggacgcttcttggtgactccctagagcttacatcttatctcggggtcaggccttcgattgccaatgtgggctactatgtaatgtacctgtcatatgctaaggcgctcccggcaaaatttacccacaacgatgtggactatgtgaggtttgccatataccttcacaccgaaattgatgcgcagcaaactcctgacaacaacttcgtctttacgttcgccacacccgggacatttgaaaccccagacctcatgagtagttttgtgattggaaccgatgatggacaaaatagcaccttgaatttcaccactgttggcggagaaaaacaccgctacaacaacgtggagctcagctcagaaatgaagggcaattgtgtgtatcactcggctattatccggaacgtcgccagctcgcaatcttgggtgtcgtttgacttctccctatattggcgacgtaccaaaattgcatatagttacgtgcagtattatttcccgaaaccactccattcacctgaacccataggtcctgcctggcagagaatctaccattactttagcctcctgacgcagcttcgctacggaacagtagcgatcaccgtggtgctcattttccttataggtgcacttctaaaacgcagtcgtgaagctcattaataccgacgcgggttcacagtaccaccacgtgattgtgtgtttataaactatctcagggaagctctatgaccaacatgactgctaacaataccaccactgccaacagcactgctacggtgacgacaaccgtcgccacctcgaatatcacgagcgtgagcactaacgtcaccaccgttcttactgcgacaaccaccgccgaaccaggaagtgtattaacagaactcttgggtatcatcatctactgtgcttctaccgtcgccctcctctgtttattactagttttagtggccgcgctatatagcacttgtcatactcgcaacaaggttaaaaccaaatactcagaacaggagggcgccaaactaatcaagaacagccggcgaagttcgcccagcagcaaaaagaatcgacccaacaagggtgactaccaacagctgtggcaatcgcagtcggaaactgactccaccagcgacgatgacgcggataataacgttttgtactttgataaaaaaggaaacctcacgtccttcgtcaatcctcaatacggacatcgctcgtccatgatgatcgagtctcaggccgatgacgacgagaacatccactattacatgtccatctacgatgaactcgctgccgaagccatggccgatccatccgaatcgtgggaaatgcctaagatgttgcaagtcagcactcgagaagtgacgttgaaagagcccgaatatgacaattagctataaataacgtgctgtcaataaagagtttttagaacacaacatgggtgcatgtcgtgtgtttatcactgtcgtcaccgtgtgtatgttgttttgtgcgttcactgttcagggatcaatctgtactaaagaatttgggaattggaatccgaactacaggccggacggttactgggatatttgttcacgacagattgatgcaccactccgaaatcaattgttggaaaaaataattaatgcgtcagtctcgtatcattacgctaccagtcataatcatgacgacgttagtttactaaaacggtaagttatccatcgctcgttaaacataacagcggtgttcacaacagctgtgctttactaattgtgtgtatatatattctagcatcaacgtcacagaagtggcacttgtggtgaacagcgttcaggtgagacctggcgagattgatgaatgcctgtaccgccagcagcctgaagaagagataaaaaaaaacacaaaacaaccccatcttactcgtaggattggattaattaaagattatatttcagcaaagaaactcatcacatttgccgctagcggatctcacacatcccaatctagaatactcactgttgctattcgcctgccgttaattggaaagcgatgaaaaactataatcaacaactctatacctttgttttgctgatgctattgcgttatggcttcggtgatacttcttctatcaaggatcttaaactcggcaatttttgtcccatgtatccatctcctcgacaaaattttgggttgtttacatcttacaaaactcatccaacgggaccggaatgtggaaacaccagcctttacgtttttcacaataggtataatcaataccttattgaaagaccatccgcgtggtcaaacaaactggcgttctacctcaggtgagttttgtatcataacgtataatattcataatacagattataccaatacttttgggtgaacatatatttttataaatcattgtagtgcactacactcgcccgtgttccaaaagttttcgaaaatggctattggttacaattgcgtacatattcacgagttccattaacagtcttctttacacagtagattccgttaccatttggaatggtgctatttacaatttgaaagtccaagcacaggggtaatcgtggtttcccatttttgttcatgactgtctgcgggaaatgtgctattgcctcgttaccacagggtgagccgtactggtgaagccagagacagtctgattttggaggaataaatcctagcttcgttttacctttgcatgggcattccttctctctggcggtgccttgtaccgtaccacaaaggaacataattacaacacacaatactaacgaccgcatggcgatcaaataaataaacgtaagatacacactggtccgcgcagccgccgcggtgatgttgatggatgatgttgatgacaagctttctggatgatccgacatgatggtaattgtttcctgaacccaaacccttgcagcacgcgggatggaacacgaccacgctttccagcacgcatcttactcgccctagagtccgctaacggcatcagaggtaggaaaagtttccgaagcaatccaggcacccggtatccagtccgactcttcaagttttttcaggatcttggagggaatgagccgcagggtcactgcggtaatggcgctgtgcctccgaaggacgagggagcgtttctgtgaggtagccatcagtactgtgcaggccccatggtcgtcggcgcaggaggcatggtgcgtcaagcgctcccatcgtccaggtccgtcgcgagatcgagcggacagtagctgcacggcgttgtggtactgataaaagaccatatggatgttcgagggggactttccacagattcagaccgacttataaagcgtgttagacggaaatactccgtcaccctttccgcggattcggctgacgcggcgtcacatgttctgcgagttctatacaaaagtgctgttcagaaaggttgcgcaggtaggtacgccacgataaaataaagacacatgagactcacaacatcgtgactgagactgttttttattgtgcattgtggttatgcaatgtcatcctgcatttatatatacacatttatctgagatatctcatttctttttgtatacaatgaaagaggagtatgaacaaaattaaaatggacagtcgtcggtttcttggctttctgcatatcagtgctttggacgggagtcggtgaaaacggagaactctgggcgaggaggcggttaggaaatcttttcgtacatgtaggccgtgagcatcttgccatatgtagtgttcactaagatcagtcggcagcctagcgccaggaggattatagaaaatagaaagattacgaatatcagcaagaaccaccagtctcgggctgcatcatcctctgggagcacggagtggttgccggcctgctggtgttggcccgagtccacgtgcgcagaagcagtggacgagttggctagccggcagcgcacgttgtgggtggtgttgcatctattcaccgctatcgaggagctattgcaagtgtcacattgggtacagatggtttcgcgcttgtcgttgtaggacccagccgggcacggctcgcacaccgtcccggtggtttcgctgcagttcgtctttaccctatatcctttgccgcactttgggcagcactccgagcccaccgcgtactcatcttgcttacacgcgggtgcggcggaccgacttgccaggacagcggcccagatgaccgacagtagcagcatgtccctccggggtggctcatggtgtctcgcaagtcgcgtcacccttccgtgcccccgactgaccccacggtgatcacgggccagcggtttgccatccgaacaccgtcacgtaaatacacaagcccgtgccgccatcttgctttttacaccactcggcgcacatgcacacgcaacacacaccatagatcaaattatgtatttactacaagcgtctctttattttgctgtacagaggcggtacggcaacttcatcatacacattctcatccaccaagtcgttgtacgactcgctgcggtcttccttctcaaaatacccactatcactctcatcatccacgaccgagtacagctcttcgtagccaggcggacgcatgaaatgcgtagacataggtcgataggcgttcatctttttctggaagcgttctcggttcctgcacatctcaccgcacgcacaccgaaccactagcaccagccctaggcacacgccgccaatcaccatcatggtcaaccccagagaaacccattgccagtctataacaaaaatagggacaggagttttttctgtgggcagcgggggttcccgacgaaagttctggctacggaaacagtcaccatccaaaacatactgttgcagcacgggccaacatcgatcgggctcggacggagggcaaggcggcttggtgttggactgattactagctgccaagtaatagtacagtctgtcgaaaccgtaaaaggttccgcactggtggcgctgccactcattgtactctgcgctccagatttttttaccatcggcatggaatcccaacttaggcgcacagtctggatcaccgggtcggtgcagagtctctatctgcgttactatggtgaacctagtcatgagaaaaccgtgagtggcattgcgaagcacacaatcgaacatgccagtagtgttatcactaatgttcatagtcagggtaacataatgagatatggccaaatcgtgaaacttccagctggcattaatcaggcggtaagtcaaatcatcgtccacgaccgtcccgttagtggcattgatcttcagctcataaccaccatattctgattgacagaaccgcgcgcggatagacaccatcggccaagagtgaggcagaaaggcacagggcacggtcacctgggacccaatcggcataatcagaggtgccggcgaattgtgctcgtagcactcgtcccacattgtgtggtctatgctgcctcccctcaccctcggcgtcaggctcaccattacgatggtgatcgccaccatagcgcgtctcacccacatagcggctcgcggcgccgataccggcgtgcaggctttgactcggagcggcccgtcatgaatagttcgttttgaagccgattctgcgtccgcggagtccgcaccttcctgcccctccgccaaaagctgcacggtttcggcctcctcgctcacccggccgaagccttttcgaaaccgcacggtatacgacatgataccggcagtttcgacgtgcagtgaccaacaatcccgcgaccgtggctcgtgctcaccgccgaatgtgagcgcggcctttatgacgagatcggttgagcggtcctggaactcaagatcatcatagtgtcgccgcttgtggggtcccaggtcagagaggactcgtccgcctgttttttgcgatacactatagccggcaaggtgaagtatcgcagccgtttccaaggcttagtgcaacagatagaaataatgatgagcataaaaatgagaaaagacagaatggtagctacaacgattggaatttccatggcgcacgaaactcagagtccatcagacaacgacagtgcacaaagtagttagatatagaatttatttactggcttcacaagctgcgtcacaccggcccatcccacgtccgctctatcaggtgtatcaacccaaccgatcgatcgatcgatcacccagtctctacaccataggtgtatggttctcaatgtccaccacagtctctgcggcacgatcaccgctgctgttactggtgatttccacacggggcagttcatggggttgctgttcatgggattcgtaagtcggtggcgagtaatactgcacggggtcaggcgggccctttggtccataccaccactcctcacatattcttactatgatctccagtgccgtctccggctcgtcattctccaaaaccctcaggctgcgaaagtccttacagttgcagccgtatcggtaccagctcagaaaacaggagcaagtgaacacgtattgcagggttgcacaggcgtgtcgcggatagtagcacaggtatatactggccaagacgttaaagatgagaagaaccacaaagatggcagtcaacagctgtgcctgtattatcgggtccatggtgatagggaagaggtcttttaacagttaatttttgtttacgctcattctaatgttgcagatgagatggcaacttccaagcattcttgtatttcctcgtgagtctgcgcgggtgtctgtggcgcggcggcctgggtaagcagtggttgtttgctgacaactcgagttactggttggtttccttcaatggtcaccaccgtgtccacgggctgcacattctgtacttcaggtactaacccctcgttatctccttcgcggggcggagagtagtactgcacaggatcagtcggcggagcattcccgtgccaccaccgtctgaatcggtctgtaatccatccgcctatcgtgaacaattctccgctgttcagagatgtaagggttctgaacttttggcaatcgcagccgtagcggtaacaactcacgacacatgcacaggtgagcatgtccatgatggcagccttggcttccctcggatagtagcagatgtacacgatccccaatatggtgaggatagtgcatatcacgataacagccagcagagcatacaattctgtgtcctcagaactcatgacggcggcgagaacgctgacaagcagtcagttagccagtcagtcaagcacaaaagcagctgctgcgagccgtccaggtaaagccgacggtgttttttatctgccattcttgctcgcgtcagtccatgcgtcattgctggctgctgtcgctcacgggctgtgtgctaaccacggtttgcatagcgacgggagcctcggagcccaggatgggtgccgcatctgacgacacttcgaagacatcctcgtcaagcgcatcggtttgttcctcctgaatggaggacatgggctcctgcgttccatctgctgacctggatctggggggcttgctgatgcggggcttttttgttttgagctctttgagatagtcaatttccattaacacaccctctgcctggcgtctgatctcttcacccttcaggtaacttttcagcaggccgatctccaaatcgggatcggaattcttagaacggcatctttttcggcaaccgcccagaatgatgccgagccacggacatgtgaacacaccttggcagacagccatcatgtgcatcggatacaccaaggttagaatcaataatccagtacccatgatgccgacgcctatggcacacaggatgaccacaaccatctccatctccgctgtggatggtaaacggcggatcgaggctcacctggttcgactcgtccggcgccgcaccgagtcccgcgcgtatctttcactctggcacctggccctctggcatccagccctttggcgagcgcatcgcaggagcctctttttgtagatgtacaaaatgtgcaaggtcattgtgctgctgatgcgctggaacatgactggagattacacttatgatgcgcgaacatgcgcaagtccatacgcacttctcctatttttcagaggacacctgcggttgcatcttcatcaacatctgcagagtgctgcgcacagcggtttcgatgacggcagccatctccggtgtcacattggggatttgcatcatatccgtagcaaagatagtagcatacggacttgaagagggagggtcaggagtggtattgggaacctcagtaataacagcatactcgccgtccatcatcagggtaacttttttacagttgctgtagattctttccgtctcggtgtcggaatggctgagagaacggttagtgggtattgtaggcaaagcagcggtgacaatcttttcactttgcgtattcactgcttcatccatctctatgctcactccgttcgtgggaattttcttacccgacgccggtggacacatgatgagcactcgtttgtagtcctgagcgaatcttttaaggttctcacgcaagtacacgtttcggtactcgctgtcaaacttttcacctcggattctggtggcgagtgatcggaaacagtagcatgtaaaaatgtccttgcatacactgccaacgcgtctcacatggaagatgagaagatacagaaaaagaaggatggcaacaattgctatggaaagaactagtcccacaatgatcttgtcctcctggttagtcagcatattcgcgggttgtggtggttagttgtcttcagggcagctcgtgagcagagcgatgttggcacggagccttctggtacgtagctttgtctcaacatgcttttatgtagaatgacaacgcttgctgtgaatctgacatggacggcttgcgcagtacatgtcaatcatatgcttctgaaacttgttcggtgttccccttgcatgccgcggcaagccgtcgtatgcaatctgcacagcatcccctgttatcttctgaaatctgttagccatggtactggaaaaattatcagtatctatgacacctgtcataataatcgggtagctgaaacatatgacttccacatagatggccgttttcagggttccggtaagcatgacaccgtccagaacatttctgagtcccgcgtcaatcagcgatgtgagtcggtccttgagctgctgcaaatccactgcaccggctttttcagatggtatgcgggacacatctacatgtacttcgatgtgtgtatgtttcgcagcgggagttgagtaggtgagctccgtttgcaccgctctggataccattatgggttttgcgggacacggttcgtgctcgcggccgcgtgtgcctcgcaaacatttcttcaacttccagaaagctacacgaacggacgccagcaatctcatcttgatggatcaaactgtggttagtgtaaatgctgtcgtgaggatgttgattggagtttgatatatatagtatattcagtctaggctatatcagtgatgtatctctacctccctctgtctttcctctgaggcattaagcacattccaaaacgtgctcgaaggcggcctggaacttgctattcattatttcggaaaagccttcatcatccatgatttcggccagggcggcggggcagttgctgacaagtaccttagcctctgccgaagactggtacggattaattgcctgtacactgaagagaacgctttgtaccttctccgcaagcagcgtggttagttcctccgaaaatgtacatgactgcaacgtgtatgtgttttcggtgaggaaagcacacaggtccacctccatatcaatcatggtgtgtcccgaggcagaagtagagtagctcagtgcggttttcaccatggagtttatagtggcagtgttttgagtacattggctctgcttgcgtttgcggcgaaatatgctgagaaacctgtgcatccatcccttcaaggttctgcaaaccgtcgatagcatcctcacgatggcgcagcggtgctcgttgcgtggatgtggttctagatgctgcagatctagagtggagcaagcggtgtcttggcactggttcatattatcatgaattgtgacacatgtcatggtttagcttttcggtgcgtttagaagcgcggctttcacggcggcctcgacggcagattgaatgagcagcgccacttctggcgttacgccagccgccgcaggtatatcagcattgggttccggggtcggtgcaggagcgggacagggttcgggatctgagtcgggttctggaacggaatctggaacagaatccggcgtgggtgtgcgcgtcgcttcctcctcggtatcaggcgtctcactcacgctatgtttggatggaggtttgtgaatgagtgcctgggtttcggcgttgtctgcctctgcgacatcggtatgtgtttgcgcgcgaggagactcgtctagagttggcagttcgcactcaaaaccttctaggtccacggtcacaaactctacctcagtttgtttcttgtccttgggttgccctcggcggctctgaggaggctcggtgggatacagcttggcactgagccagtgacagcaagtaaagcagcacggaaagtagaattccaaattttctttagttagcttgtttctagctgaaatctgcgagcaacatcttccagtaaaagctacgcatctggaaacgcactgacaaaaacctgcccatagagaagcgcaccacaaagaacaaacgcacatggtttcgtcctcatccccggtggacgcgtcgcgcttcgtttcctcatcaggcttcttcagtgaacagttaaagcgcgtacacagtctactgaagaaattccaaatgtagggacatacacgatctcggtagagaatgatcagtatatcaaagattatggctgctggtattccaatagaaagcaaaacaattgtcgcagtatccatctttatcctaagaaccgaccaccccgacaccaaaagaaagccacagacacggatcactggaaaagcaaatgccaagcggcctttttattactaagagtcatgtggaatggcgcagcctcatagaatagggataaagtgcaagtgattaaagcaaataacagcgagttacaccaacagttttcaacatcaccatctgttttacagctccgaaaccaataccgcacaatatttatgaacttgaggcgtatacacagcactgctagtcagttcggtttccacaaacaccttttcggtagttgcgcagacaggaccacacaatacagtaggcttcggaggagcgacctgcacttcagtcttatcatcctgattgttgttagcactcggatcccaggtgtttaccacctcccactccactctctggttcgcttcatcttcttggtgtcttcggctccaatgcgatcgccgccgtacttcgtaacgatctttttgacaacagtgactgcagtcgtgtcggcacctgcaccatggtccgcagtcacagcacacctcgtaacacagtccgcaggtaaacggccagtcgtaaatcaggtagatgaggcctactagcgatgtcattccgccggctccacataccaacacgccaagaggccacatgtctaaaacactcccagcagaattgttggtactcggcgatgtagcgttcatgttgcggtagctgctcgtcatcatccctatatttcggcagtaactcacttttcgggttatgttggttttgaaaaactaggatgagatgtacatttgctcgtaaccagttgttaacctttttctctctggacggtatcgaacaacgagctgttctgtgtcgtctgagtggcgttgacggtagtattttattcgtttcatctttccctgtccaaacattaacactacaacaacggtaattacaagtgccaaagcccacacggcatgcgtagctggggctgcaacatcctggagataaacatcaacagcagagctagatgttggtggtgtggaactagtaaacctacagaattcaggtgtaatgttggaatagctagttccatttccagcaataactgtgagctcaaaagcttgaggctttgtattgcaactagtctctggtttaaagacgtatctgcggctatcattgtgcgtaacgttataaagcattaaagtaattttgctgcaattataacataagctgaaccagtgatgtttcgtttgatgagaactcgaggttttacataattcatgctcagttgttttattctgagtattgttataaagcagtagccacgtagtttgatgatgggcagcatcgctacaattcgctgtaaaattaacggtttgtcctaccgttgcattaacaaatgttattgtgaagcccatggtagcatttgcagtcgttgaagtacgtgttgttgtaacactcgcaaagctggtcacgtttgttgctgtattagttgtgtgtgttgatatactaacattagtagttaatgtgctaatgctaatattatttgtggttgtactagatgtataagtagtaccaactgtagtgttagcagatataggactagtagatgtatttggataacttgtgttgttgggagtacttgttattgctgtgctaaaggttgtattacttttgctagttgatgtatttgtactagtagcagcttgtgttgaggtgcttatactttggggtgatgtcacaacgcttgtttgaattgtgtttgtggtagatggagatgatattgttgaagtaattgttgcattggtggtagtaggtactgttgatgtattgtttgaagcagcatagcgagaaagtatagcgatgaaaatgtagatggtacgatctgttacgaggtagcttattttgaaatgcatattggaatttacgtgctgtatagtcttgtagtttaacagtcgttatacctaagtgaccgtacctctgtctggaatacctttataggttgttcgtatgctggtgtgcgtcattgttgcgttgacgtttccacttaactactcttcaagtacgaagttgtttagaatatcaaaaatttcgagtttctagggaacaaacagtaattagataatgtcatagctaaaaataataaaaacatgtagtgaaacggattacctacgtaatttagatgtatatgaaaattattgcagaaactgcgcgttgtaccaatccgcgtattaaacacttagaacgatgctgctggaatcataatagttatgttcacaacactaaatggagcgtagtcctacagtttaaaaatgtcatgattataactaaattatataaaacataaaaagaacgtactgtagtaatgtttataaacatttcaggtgctaagttcggattcattagtagttacctatattactaaaatatagatatatacagttaatatcagcaaaacatttttatataaggtgtattaagttatattgtatactaaccacctgtatttggtgaggacaatgaaaacagtaaagatagacaattagatttcaaaatgatcctggaatgattaaaaaaattagatattaacagaaacatgaaattacttagattgttgggccatcataatacacacacacacacacacacacagcgaggctcatgctaaatcagtttcctaaatgttataaattatcgcactctttcatttgtcccagtataagtatgtacatagcgtatacaacaatgtgcatcataatttgcctaaagattataataccaataaccatgcaattatatgtgtacttcctaattcatactatgtgtcatttctaacaggaagtttcgttaccgtattggtccaaactacggtacctactgtactcactgaattgcataccatctgcaacacatatacacacatacacacaatatatagcaacacatgtgaatttcaaaatagatctcatggttatacaaattaaagtcataaatcatgtcataactttatttatttacatgcataggaaatctttgtatatgcaacacgttaggttcttccgttatcatagatgtacagataattctaactttttttacatatttgtataaacattgtgtttccgttgcagtgatgcaacgcacttcctaaacatctgcacaacgacttgtggcagccggagccagcaagccacagcggcgcatatgatcaacactacaagtatccaaagaccatgcagttctcgggaagcgtattgagcttcatagacgacgagcgaaacattgtatgtaaacgatgtggatgctgatatcgataacgatgtgagttgtgttgtcgacactgatggtgttgtaacggggcgcgctgtggtccaccatggatgagagtaggtactacagttatggagaatcggaatgggtggacctggtgtactggtagtattactccacaaacgggagtaaccagataataaacaattggtagccttgttagtacattgaaatgtaggcgtacctccagacgtcaatactagatagttccagtataagtcctgtccacagagtttgacagtctcattatgaattaccgtggcgttcacagcaccttgaacaatcaacgtgaccgttcctgggaaggtgctgttgaaactgcaggatacattgtacacactctggttagtggaatgtttagaagcataggtaatacccatgggagtcacctgggttctttgagtaatgttcataatgttagtaacgttgtcatatgagaaacagtcatatgtcccgggtgcatggggagatacaggccatcgcattgtgaagccatttgtattactcgcactagtcttagactcgtcatttggaaatattggtgcatggtttttatacatgtaaacttgtgtggtagcattttgatcacatgctgtaaaataaatgcccctagtacattctccagagacaaatatacacgttaccgtgtatggacctgacagtgtttcgttttttgttggaccactaacaaccttggtcatgtttataggaagctgatacttcatatctgtattactggtataatctttcgaagcacagcgtaacgcttctccagaggtgccggagggccacatcatgagcagtattaaggcatgcgcatgtttgtgagacaccggctgcatcatggccgtgctcttgaccttcaagtaagtacccagcccataatttaaaataacagacggaaactgtaactgttaaaatcaataaatacttttattataaaagctgtaacaatcctattgagttctgtgttgtctgttgcggcggaggtcgaaccacgggtttcttcctcacgatgccccatatgcaaaacccaaacaggcacagtaaagtgacggccattacggagatagttacaatgtccacggtactaagggtcatctgtattcgtacagttgtgctgacagggttcgcagaagtaatgttcacgcgcgggccatacagcctaggaaccggcgattaacagcgcatatctgagtcttgtagactccagaaccgctccccgagcatatttatccaacacaaccctcacgcacatgacgaaacacataggccgacactactttcgcacatgtccgtcccagatggcctgtttgacacttcggtagctaaaccgtcgccaccttggtttccgcaggggcttccgaggcgaatatagttcgaaaccgcgaatacagcatgaaaacagacgatcgcaccgccgtggctgtgcgaaccgcaataggcgttgcagtagccatcgggcttgtgagtctactcatagccctcatgtggtggctgctggccaagtaacgatccacaccatgaattgtcgcactagatgtttattgttttgggagatgatgggggtgagcgtagtgttggcgggcgtactgggtttgacggcgacggtcctgcttcacatgcagcacgtgttggccgccaacagcacgtgcgctgcgggaaacaacacgagcaataccacaaacgttacgggctgttcgacgtcgtcgtagccgtgcgacgcgggggaatgcggcgcggtggcggaggacgaggaggacgcgggggtagagagggcctagcagtactgagagctaggacctggctaccttcggttcctcccttctgttggcaacagttattggcgcccgcagccggtgtcttgacgcccgatgactgtttgcgacaacgaaagctcaataagcgtttggaaagagaaggcttcttggtggcctctttgttgtgtctctttaacagcgtggcgagatccgtgcactgtcgattggcgtgacagacgcgtgttgttggtttctgggtatcatcacactgaacggcaggcgatgagggaggcgacggaggtgatgcagacgacatagcggagacacccgaggcggcctgagcaacagcggcgtcggcgtcgctcggacaggggttcttagctgtcaatctctgcaggcggcgcggccacagcgacttgcggttgcggtgacggcggagaggcagccaaatacagcacttggtcgacagaaacagaaggaaggccatgaaaagtcctaggagaaacacaacgcaaagagcaatctgaaaaaagcgactagtaaagtccattatccataacacggtgtccatactggcgagtttgttcgtataaaagtgtcggatgaatgtgcggcgccaacacgcagaccttataacgccttaggaggcgagcgggcagggcggggagaggaatcatgatagtcggagcggtggcgcgaagcgagtttgcggcgtgcacccgtgccactgagcgcgctgtcgttgttgtcgtggtgccgaggcggacgcggagggcgggagaggcggctgccctgggcggcggcggtagcatgatgcaggagcacggaatggaaagtggacgatgaggaggaagagtccgcagttgtgtatgaagtgtgcgtatgaacagggtgatggcatgcgcttctgggtgaaagcgagcgtgtgcgaagagctcgattgggaccttccgtaaaggctgtatgattatcatttgcatgcagctgtgcgcttggcgtagggttgtccgatacggcagagaaggacgagattaaggcgtacacaggcacagagacggcgcgaaacacgcgtttgcacagcctgtacgttgcggacataggaagcaaacgctgcacggcaaggtagcgagtgcgctggcggagcgagaagccgcagcaacggcagaactcgttggtgagagctaagagaaaagccacgaagagagtggtgactgtaaaagcgaaagtaaagcgaaagaaggtgcacatgacatacatataggacagcatggtggcgcgagggctagctgcaggattgaggagaaagccctggcttgtcagtatgcgagcaaaatgctcgccggagcgaagtttatgagcacaggcgggcatgggcgggaagaggcgtgcgatgactagtcatcagtcaggccgagggagcgaagcagaaagtgtgtcctagcgaagcaggtaaacacaggcgctgacaggcagcaagtgtatgcatgtactggcaggtgaaggtgagctgcgcaggtaatcctgacgcacctggacctgggcgggccggttacccggccgtctctcaatgacggtgtttttgaggcgaacatgttcggcccgaacccgctgggcatacgcagcggactgtgtaacatgcagttacaatacaatcacacagcacacacgagcagtcacagagagtgcagcaagcccgagctaaacctgatcgacaggttggctgcctgccaagtctcccgggggaaaaaagacaaccgcgtgacacggcgaccggcggcgaggcataacaaacatgtccccgctcccgcgaaccccccgggtgccccccgagaccccatgctgtgcccggcctccctcctgtgcgaccacccgctgcgctcgctgtcaatcataggcctcctgctgggcgctgtcaatcaatgcgctccattgttctatctgttggctttgtgaccattgttattttttattggcgcgatgcccgtaacgtatgttttcaatcagtattcacatacatgtttactgatcacgtatgtgcaatctcatctggccgcacgccaatgtctcctaccaaccctcacggccacttgccattttcagccccccgcccaaaacaccccccacccccttcgcctcgctgccactacccggagcccccgccgaggcctcattcgccatacaggggaggaaatgtgctggcgttctgccactttgcacgctttgccagcgtcccatgctataaagctcgccgcttctctccctcgcctcacgttctgagctgaacgcctccacttcttgagaccctctacccaactctcaaacagccacctctccaaccatggcagactcgaccaccggccccgactttcgccaccccgaggacgaccagctagtgccgcaggtacttgtctctactttgtaccgctttctcgtctgctcgccattgctacgcatctctttatccctttctttgtcgctttttagggccgtccgtcctcgcccttatgtcccgacgttgccgtggttccactttcgcctgaaatgcctaagttgaccaaacagcccgaaatgccttcgactattccaatctgcacttcacctgaagctcctccgaaaccgccgcgcctgcacaaacaacggatacaatcgaccgattgtcaacgcccatctaaagccggctccgacaaagaagaaagccccagcaatccgcactctacatccaacccaacaccaaagccaccatcgaaaccactatcgcaccccgcaccggagcccacgcagaatccgcagcgcaaacgccagaagaccgtgttaaagcgtcctagccacccccctccaccgcctcctacccagtccgccgtcattcccaccgtgtgtgttagtccccctccctcagctcccccttccaagcctccccccgttcctcccaaaagacgacccgagttacacctgcccctcaaaggtccccgcatggtttccattgagctcccttgcctcacgggtagcggctcacctacctatgactatcctgttaattcggctcgtaccctgttataatacaatccatccgtagtaatcacgccgaagaaggctgtgtcgtctctttctccgcagcccgttgcctgcgccgctgcaaccaccgctcccaccagcctcgcatgcggaaccgacccttaactctcttccaccacgacgcttcgtcggctgctcctggatactccaagatggcagcggggcaggacgccactgagacatacgaacaggtggacgaccgcgacgaacgtgacgagtcggagtccagagtcaacgagcgactccgtaaggcatgcccccgccagtccccgcactgacaccacacgtcatgcgcccccttgatttgcagtctccactgcgcctccacctgcgccggccaactctccggccgtgggagaatgtcctccgcgagcggcaccacgtattcaatgtgcgccttccagtccatgcaggcacaccacaaatcgtgggagtcgtcagcgactcggcgccatgccaactcccgcataggcatgtgtcccacaagcccgcaagaaacgacaggttccatgttaactgtgcggactgtaactcgaagtgtgtctaaagttgtatgttatcgtgataactgtgtagtgcgattgtctaactcatccctgataacccgtgttgtcattgaattgcatgctgtcgtctgcattactcatgtacgttctctcctaaatgaaacaggcctagatctataaagaaatcgcaaagacattctggtttctgttttgtttcatttattcgtgtcgttattaaaacataaacgcaggaaaatatatctttagcgtatcttcaggaaacacatgccagataatggacaatgcgcaaatcattaaatgtagtgtgcacactgtcgtacaccaacatacatgccaccagtcgcgaaaccaaatagccctgcagaatgtccataaatagttatgtgtcagaaagtccggcttaacgtgaggctcacacgtaacccatatgatgtcggacatgttcaacgaaaatcgcatttccactttagtggtagtccaatctatttcgtaatatcttaaatcgtattccagtttatctgaactgagtttcatgtctttttcaaaaaattggagatcctcaattcctttgtcgcggtataccacaacctgcacaaagtaagagtctatgtttccagtgatgtatcccgtcatgaacagcttgccgccctccaggtaacatgctgtctgttgaacggtgtataacgcgcgtcgtgcagctagctcttcttcggtaagcactggcatcgggaaatcccagccgaatgtcagtccgagctgcagcgcaacgccgccaagcaccaatattgctagagaaaccgccatctcgaacgtttggagccgtagcagctaacattgtgcacggtgtttctgatttataacaaaaagcgctgcacgtaagatgttacgtgtatatcgaatgagagccaactccaacccactaggcttagtgcccgattgcctaagcaactaactatagagtcgcataaaaacacagcactcgttattctttatggataaaaacactttattgcacatattttgatgaacatgttactgtaacactatcacggtgtcacagccatgttgtccgttatgaggtagttgcggttaattgtccacatgagcaccacaagccttgtctcttctatgacccggcaattccaaacatggtgtcacattgagtgacagatcatcagtctgcgatgcttcgtatactgtcagccgctccatctgtaacacatataaaactcgttatggttttgttccaatgtatgtgagatattacccatcagctatccgcattgtaaaaacactataacatgatacacggcaaacagtttacctgctcacaccttgttgttaatggacacctcgccgaacatacgaacatggacgctgaactttgctgcgatgaatgttacgattgcgcatccgacggcaacgtaaaatgccaatctcgcaagcaggatccagtcattgtggcgagatactctctcggcataccaaaagatactggtatgatcaatttcaacttggacctcattcacatagcagacaaacgttttagccaatccatgatcgtgatacatgcgcaagtcaacgcggtatatggtaggagagacagcttcgtgcacttcccatgttctggtattaagcgtagaatgtgtctgtttctcatgtgaccgacgaatgttatcccggtcatgagtaactatctccacgctttggagtttcgcaaaatcagaccgaacagtaaacgtagctgtcatctttccacccttaacatgacaacgtgaatgaagcaactcatacgacgatgacaatggtaagggacttgcatcgatggccaacaaaagcgataacagtcccaatgtaacaagaatcttcatttcgatgttagacagtgtatcccagaatataggggtgaaagtccgcaactgtcctacagaaagagcggtatggagtgaacggtgtttgcagatatatacactagcaaacacgcccaggaaagccacgtcagaatcattgacgtagactccatagtgtcattctgtatactaaccgaatatggacacggaacattcgtcgttaagcggttttaggtacgtcattagttaaagttacatgtgcatgtaaccacacccgttatagggacgttgacgattgtccatccgtcacgatgatttccaggttgccgatcatttcgcgtttcactctcccaaaggcttggtgctatagactttggagtaagtatctatggcgcctggcctctggggaagtggtacgcgcaattcgggacgcccgttcatggaaaaacgacagggagggatcatgatacacagattttttaagatccatgccctttgattttatcgactggatcttggcctaggtcgttactctcagctaagtgcaaagatcctgccgacgaaatcataggattcatagttgtgttcaaggataaccaattattcgacctagctacgtatcatttacatatgcattatctagaccatatgagcatgctgctgggttacatctgatgaatttacagacgcacaccggaatgcataagcaaccaaacgggatataaaggaaaacagggcgggagagaacaagtatataatggtgcatggtattatgagcaatgcgtgttatcgctgactgtcctgtcgctaatcgggcgtgcgacgacctggacgtgcaaatggttgtatggtacatatgccttatgaataacaaccccttgcacatccatgccgaaacatgttcgaaacacatcacaaaacacacaaattagtatggtttatctttttaatacaaagaatgaataaaaatatataacagcataatctgagtttattaatgactgccacaacgtctgagacaacgaacacgatccaagtcctcaataacatacagcattaatgctgtaagcataagtgacagcaggatcataaggagatacagcattagcgtagctcctccataccgctccagcaagaacacgatgccttttggtgttgtttttggacacccaaacagtccgcggatgttgagtgcatgtccatggtgaaagcgaagctcaggatcacagcccaagatgcggatggctcgttcgtagcgcctcatgaacgcatcacatgcgggaccctggtccgtaaacgggcaatggcggcctgcttccttctgatgaagaccgttgtctggctgaggcacacggtcgcaggttttctccatgttgccgtcttgtttctggagcgtatttgagtcattcctccaagcggaggcgacaccagataagaccagcaaacatagcaggctgccaatcaccacgttctcattagaaccgcatgagccgcagagaggcttcataatgcgtcgatggctcacggacaatctgacaggtcacgttagacggtgatttatatccatgttgatgtcacgtgcaggaagactgaggcgcgcaaaccatggactgcactcaacgaccgtacgctgtgactccgtttgctaagcagtcatttcacagggccgatggaggttttcgccacaccgatttcgtaagttgatatcaaactttatgatcggtgcgacgaaatcttgatcgagacctttttttccaccagcagcagcaataaagttcatcgtgtctggggccggtcaaacttgaacatggttgtataaaaaattaatagttaatttgacaacagcaacataaacaatacccatacaaatccaatacaatttaccacgatacgagttatgaaattcttgatattcacgtaggtagaaatttacaatttgagttaattcatgttcaggcacacattttataaataaaggtttgtaataatgatccacttgtataaccacttctttaaacatataagacaccggtaaatggaactggtaacgtaatctgctggcatgttccagacgcgcatgatgaatgatatcgtgatccctgatgtatgttttagcttcttccagaagttgcataggatgaattgaatgtctatacatagtatcattcataatcactaatggatgatctaaatttgtagaaaaggcaaacattaattttccatcataatagtttctcaagtacacatgaagccacgtaggatccggaaagtcgccaagaacaattccgtttacatgaagccggccatcttcaatcttgcattcgggatccaattctgtatagccatatatacgtctatcaggtattcctgatcttggcttatatgtacgtctctcttgacatattttattacaacgttcggctggaacgatgagtaaaaggcaggtgaaaagaagcgctcgaggcaggtggtagcagtacatcttaggagaccgcggcattttggcatagacgtcgcaatcttctgtgagagtgctaacgtagccgtcctaaatatattcaaaagaagaagtaaacacaggataagcgtagctacatttgcattgacgtgcgctgcttcgttgggtactgcgtagaaccacacgcaattgacgaataattaaccgttaagatgaatttgcaatcgtatacgtcaatgcaatgtgtttccatgagttacaagttctgcaaaaacacccctgtcaatcctcttttgatgacagagggcggtacggtatacgtggcacgaagcacttccagtagcattccccaattgcacaacctatggcaatcacaacaagtaagatggccgttcccaacatgatatccatgcaccatagccatgcaatggtcgcatatcttccttcatacaccagcctttggaaatccccattgaataagaaatcccaggaggctattgtttcggggtaacacgggatggcgcacgcgcattctcgacattctttcaaaaggatacgacccaggtctgccggcgcaggtgtccgtgttgtaagacagatggtgtcattactggaaaatgtagtattcggcataggcaggcatcgtttgcgttgagaattttcccggctctcgtagtacggaaaaacagtggtttcatttggaagcgcttttcccatcatacaccaggtaacgtccaatatccctcccgtaatcgtgcaggtagcattggcatcttcgatatccgactcatctgctaatgccctatcctgaatccaaaagtaggcaagcaagaacacaacgagcaagcgcatattgaaaagagggttattgctcgctttgctcttgagtggctgaccgtgtgagataaatggtaatttgtgtctacttatatgccctgtgagaatattcccacccagtttcatttgtatcacgcgcacccattctcccaaataatgacataatactttaattataattaaacagaggatatactttttatttcacacaacagttttgtaatcaggctgagcacgatgactcggtctcataactctcagaactctgagagctctggtcgtcggcgtatgggcagggatatcgtgggaaagaccaggcagctccgttcagcttgtcgtaggtatagaacatccatctggtggccagccatcggtagcactcggtgctgttgggtctgtccatagcatcaagctcatcatagaaacgaagcttcattttcaggtaccaccgatcaagctcgcgttcatactgagccttttccgctgcactgaggttctggtacgctctaattgaattaatggcatcttccatatagaaagtgtcggcaacaatgacgatagggagcacggccaacaggccaagcacaatcagcctcatcgtttcaacgatagatcagcagtcccgctgtctagttagctgtgtatgcctgtgacagctccgtcaaccactttcttctgaagcaaatgtttgccagggcagtttaaactggcgtgtcgaagtgccaacttggcacggcttatatgtatcctagatggatacgtcagtcaaagtccctacgtaaaacatgtccaacctgcgttttacctgacgcacagaccattgcttcatgtcccggtgttttaacacggaaatccgcctttctcacgggtaacagtccggttcctcattcccatatgccgtaaaaccagtaggagcgcccggtaaggctccagtgcatctgaatcagcatgcaaagcataaaactccatcgaataaacatcagaaacagtccccagtaagcatgcaggagtcgaccttcaaatatgagccgatccagttgatcgatagaagcccaaaaggggaaccatgagatcctcagcttaggctcacatgtaatgagatgtgcatcacagtatgcacaaggatggacgtacagatttatagccgttacatgttttgtaagttgaatgtttttcaaaatatatcgttgttcatattctgtagacacattttgaggctcaggcaatttttctgaagaaaactttgtgattacgtcggcactaagatacagatcaggagcggtagcattgccagagtatgtccacatcgcatccaggtagttatcattaatcagatgacattgacttcgagggttttccaagtggtagtccgacactagtttcgttgcagacaatgacggtaaaggaacattcttcatcaaaaaagaatcagacactttgccgtcagtgttcatattgttaggatctatctcaaacatcggtgggtgaggcggtggcgacacactcaaaattagtgtgtcgatccatgccacatacattatgaaccccgataacacgaacaagtttagcagtttcatggttgcgatagcttggtcctggtgctgtttgcggcaacagcaccaggacgaagcattcttatgtaatttagtgacgtgacaatgaccgggttggtgcctgcacgcctccttgtcatagatccaaaaaatgtgtacttttaaaaatcgcgccatttccaacggtcgtgacggtcaacggtacggtgtgtatcgtaagtgaccggccgtatgaccttgaacgaccttgagtgatggtaacctgtcatttatgatttatgggattcatgtgaagggctttacggagacgcaagtaaaaaaaaccacaaacactgaggcttatgattaatagcttatttcgctgtttttattaggagcactcagacaacaggttgttcagggaaagtggacgaaaagtactcgggataccatttgtcagcagtgagaggcacaatagccatcatcagcaccaacacctgatccacgtagagcaggagcgcagcccgaatagcgtggcggtcaaacaacgaccgagggttataacacagcaccatcaagatgtcgtggagcagagctagtgtaatcaggtccacaatgacagcagtgagcaccgctatccatttctgagcgggcgtccatgactgatagtacacgatcgcgcagaaaagtggcagggcgagaaccaggcaggcaacaacaagccgtccgcgtgggcgggtggaggccagaacacaggcaaacacggtgcagctgagttccaacaccagggaaaacacataagcctgccacagtacggtgcgttccaaacacatactccaaatcaccaacgcccatgtgttcaaggcagtgtagaccacagcagcgggccatacgctgaggcggtaggttgtctttctacgaaggttgaaacgcagaacagtgggaacgatcatcatccagataggcagtgtgtcttttaggtaaggtgtctggattcgccaagaactcatgatgcacaaaagacatagtcccatggtgatggccagctggatggccatggccgtgtacactctgaccagccacacgaaacgccgcatccatcgcatgacttcttccacatcgtcgttgtcctgatggcgagcggtcgtctgatagcccatgctccccgagcttctgaggcacatcgcatgtgcgagccgggtcttatagactagcttcagtttttacatctttttagtgttctaggttttaacctgggcattattccagctaaaagaactgaaaacgcgattgaaaggtacatgccaaatattagggattagcatgagaaacgtgacctggaataacgcgtagtatgacacatacaaagtcagtgacccctgtattatctgcttctcccacaagtgtttgcgatgtcgttgcgtcatccagaaaaacagtatcatgaaaagatccagaaacacagtgtaagtgctcaacatgatgtgtgtgaccgtggtcgggttggaggccgcaatcgcaagcaatgccactaaactggatgctcctaaggtcagaatcatagcgtagcgacgaacaggtcgatcgtatctgttctcatcaaagttgtcaaaaaacgcggcagtggttgtcagtgtgaagagtgctacggagatgacgtgagcggccaaggctttagagacttcgccgcagaacccgaagacagtgatgctgagcgtaacccagacaacatatacggtcatggtaaacaggtcgctgggttgtctttcccatcggatgattaagcaggccagacagatgactggcagtagtatggccagaatgggagccgggtcgttttgacacgtgttatgccactgagggtagctgaaccagatgtagagagtgaaaacagcagtgacagtgaactcgaagatgaaatagctatacacctgcacgaggatcttaaaccgctgtatccaggcggtgctttcgttaaaccgaacttggaatcgaaaggattccatgatcctcagatctgaagtcgtctatcccccacaggtacatgagagttcagagaataagatggaaagacagtctgaagcgatgttaaacagataatagtctgattttcgtgaatcatccataaacagaagagggcgagcaaaatgtcctgttgaaactgccattccaaagttggctcacacccgttaacattttgtgaggatctagagtccacaggctcggtgtcagaagatacacgtacatatagtacatgacaataagtatgtccacatacactatgcaggcggagaccacgtgtttcatggttagattgaactttgtgatatagatgttttcccagatgataattcccatgctgccatgtagaatgattgacagcccattccgcatgaccgagtggcttagctgtccgaagtaaaacaggagcaacagaaaagtgctcacgagggtcgcaacgtatcgacattttgaaggtaatggtcgcgaagaccatagagctaagccgctgcaggttaggaaaaaggttgccgtgaacagcagactcagaccggctgtgattccatcggtgcaaaagctgatgagggtggatcctatacaggcaaatacaacgatgtacaataacccattgcccatatgaatcatgtcgtcttgtcgatggtcaaacatattccacacaaacatcagcagcacggggacgataatcaggataaacgccggctccattctgcaaatttcggtattaaaaaccatgcagtggaattgcgatttgaaggctccgtaggaacagatacagacggctatcacgaaaagcaagcacaggtagacgctggcgagtggaaggtgttgccgcagccagctaagcgatgatcgctcgtctagatcgagctggatcataggagcgggtgggcgatggaccgtgaagggttgcaagcgaggtgcgaaaggcatgctgacagtgctgtgaccttgacagtcttatcgcaaccaggtgtttcgaaacgtctcgcagagaatttaaagagtatggcgtggcgtgcatagtgtctggcgaagcaaacgtcataaaggtacgcgtggatcacgatttcggaacgtgagccgagagcgtagatgatcgaaaaacgctaaacatgttgtgaacgttggcggaccagatgtccttggtccaacagaaaatggaaacctgataaagcacgatgaacagggtgtacagctgcaaagagctgcttttaattcgttcgggtcgcctgtgaacgagataaaactgggtagggatgaggagaacaaaacctagactgaatattgcataaccggtagcacgcaagatgatactgagatttttagaaaacagtgcgatgagggaaaaagcaaccgcgaaagaagttatgaaacacccagctagaggtctgatccagtggagacaaatacccgggattccgtaggtacaaaataacaacagactcagaacaaaagtttgccaaatggtatggtcgtttgtacaaagatgaaacacactggtggacaaacaagttaaagtaacactgtagatccaggagctggtttgatcgacagattcttctaaaaggtgagacaccatgaacaaaactacaggaatcaagaacaaaacggaaggagcaggatctacgcgacaattagtggcgttgttatacaacatggggaacgtgaagcgcgcgaggccatacacgagaacggtggcaacgacggccaaggtaaagcagccgtagattttgaagatacagttcgtccgctgtagccaagagatactggctacactcgagcgctccatgtccacactcctcatcctcggaatggtagataagagtcagctttgcgagttacccgtggttacttatacgcctccactgccgcatccttacggcgtaacatgtgctgtgttagctgagtattgattgaagtaagctatgagtgagctgaacatgccgtcccatcgagcagaccagagacccggagtgaggagcagtacgttagcctcgtacagtagcacccaattgacataaagcatgatagaaggccacctgatttcatctacggggtgcttatgtcgaatggctacggtttccatgtaaacgtctatggaggtcaacactaaaaacaagaaatacatagtaataaacagcatatgggagggtgctaaatgtccaaaggaataaatgaggctcatggtgaataagacggtcatgctaaacagcatggctagcattttgcgccgatacatctgcatgttgtcaaacacagccgcggcgctctgcaggatgaacatgagcgcggtcagcaagaaactctgaaacgccgtccagtcgtcggtacaggtgctaaccaacagacatgacactgtcatgtaatagagttcccagaataaaccatctatagtgtgggcaatgcgctttggggtattttctacgataagtatggcagccggaatgcacatcatgagtagaggcgcggggtccttcacacagtctacagttaggtagggcctggctgttcgatacacgccgtacatggcgacggtcacagccacttccattcccagccaggcatagacctggaaaatcatagtaaagcgcctcagccagtgcatgttgaggtgccatcggtactcgctttccatgctgttcgtgttgagacaggataggaaatgatggtaataaatgagcagatacacagtgtttatatatcaagcgttcgtttaatgaacattaaaggaggcgtgacctcataaccatgggtcctccgccttccagggaaacgaccacataatcacattgttatagtgtaccaggtgaaaaatacagtacagaagaagtgaaatactcatggctcgttcattagagcgttgctgtcgccgcacattactaagctgtagacacatggcgttcatgaatcccacagtcccaataatatacagggtttgtgctatccaccagagcgtgaccgatggttgcgttacgctatgtacaaaacaattagccgccaacgcgccggcacataacatgtcagaaagcacttgccgctcgatgaagggtttccagttgcttccatcgctcacatagatcatcaggataaacaaacaaaaggtagctatccagctctgaatgacggtccaggtggcgacgcatccgctgaaccatacgtgggaaaaggctatgtgtatgacgcagaataaggcaactccgcaattcttccaaagagagacttttcgtatgacgcggttgatgtaggattcttgaatgaagacgagcgcgggactcgtaatcataatctgtcgtacgggttcctgtgcacaggtgtcgaataggtattgttggcaccgtaccaatccgtacacgaggacggtgatggagacttgaaaagctaaccaaccataaactgaccacacgtggatgctgcgattcagccagatcacatggttggttagtttagtcaccattttcgaaaccatgggtgatagcggcggaattgactgttggacgggtttcgttctgggtgctggatggagaaaagtgttgcatccagctcgtgagcctctctagggagctctcagtagtgagaatgagaagaactagcagatagcaatagattaagtcctcgtagagacagagaccaaggacacatgtctcttggctggaagagactttagacaactgcgaagtgtcgaaaaccgtcacccccaacataaaagccaacacaatcacgtagtaaccgagtagaattttatttggtagagacaacggttgcaacgacaacgcaaccaaggtaatagtgagaatgagaaaaaagataagaccgagagtgcgccaacggcgataatgcaggtctccaagacaggctagccccgtgcaggtgacaaataagattcccgccaacagcccagaccaagtaaccagtgtaatgtcaacacacaagttagccagcaccacagccgtagccgtaactagcgtgtaaatcgttaacacggtccagctgtttgagtgctgctttttggcgtgaaggatagtaagacaggcgttgggaataagcaggctcagggctggcagaaatccagtttggcaaatgctctggggaatcttcacataaggcgcagccaaaatcatgagcccaccgatcacaaacgtacaggatacttgcagagagacagtacgatacaaatgaaggctaaaaagacaacagcggtgagacagcttcaaagactggttttgtattcgagtctttttgataagtcgcatgacttgatggcctgtcatggtgatgatggctaagacttgtatcggcaagtgaagataaaaaaggcaaatatatggaagttacttttatatatacaaggttctgaatttcttcctctggtccattcaaggactgttctgtagtaggaaccaagcccaagaaggttcggtgtgattcatctgttgaatcatgtttcccatccattgattaacagagaacatcatgctgatgatgttgaagagcgcgatgatagccgtatacacagccaggctgcgagcaagttcagcggcctcggtgagaatcagttcagacgatgtgggatagataattagcagcaactggtgcaccagaaggtaggagacagcactatcaggcatagataattagcagcaactggtgcaccagaaggtaggagacagcactaatcaggcacatgtacatgacggtgaagatcttgtaaatgatggccgccttggcaaaggtcaaaaagaaaacaaaacataacatgcaccatccgtagaccacgaaaaacattctccagcgcacggcattacggccggcatagaacacaatggaattgcagagcacgatcaccactgcagtcagagacaagcccaaaccgagattttggcgcgggcaacaaaaacctgtcataacgcacgtgcctgtctcaatcagcatgcacatgaatgtggcggagcccgagcgattgatgagttctttttggtaacagcatgccaacccgaggcaaagaatagggatcagcatggcgcccgtgggcactgcacagagcaggcatagttctgtcacgctgggaaagctgaaccaaaaaagcgcacacacgcttaacgtggcggtcacttcaaacaaagtattgctgtacaccgacacaatactgcgaaacttgtctatccattccaataagttctggtgcatccagctttcggccaattcgctatccaaaggctcctggaggctcatggtgcgaagctcttgtttgtggctttctgctcttcaaaccccgaggtgttgagcgctctaaataaaacctcggcaaacagtctatcttatgcgaacgccgggcttcggagttgacgtcattaattgagattaacctccgcggcccaccaccgtcctaggctgaaatccaagtcaaagggagatgatgcagtgttacgccaaaaatcaggatcgacgataagaaggccgataatatacatgatgagggtttctacgtagatgcgaatgatgagaaccaaagtcgcatcttcgaagagctcctgcttgccaataatagtcatgtcgtgtatggacaatccgataacgaacgttaggagaagcgcgatatagccgccgacccaaagagtgtccgaagcaggaagcgcgattaatgccagcaccatgagtgcactgttcattagcatgacggggaaaaaccatcgatgaagacggctaacccccattcgtaaacgggtaaaacaaatgagccccaagttgaacatcataataattaatggaagcagactggccatgaaaatggcttgaaaagaacggcaagtggccatcataatgagagccgttgcgtttggaaacatgtatatcacaatgaataccagctgatgcatacaacgacactgtccccaaacatgtaatatgaaaagagataacatgggcacaaaaagagaaagtatagagtagcgaggtatgatgttacagaactcacgaaatgaactcggagaaactatccaaatgatcagactaacgatgacagtggaagccagttgtaatacaatagccatgcaaacttgcatccagaacataatgcgcctcccgagaaggcgtaattcgtcctccatgtcggtttcgttattgaagactgcacccatgaatggattgtttctttattaagtttacacaagaagctagcgactttttgtagctggggattaagtgagggtgctatttttggcgtgctccacccacttaggcatggacatcataaagataatcaccaggaagatggctatggtatctacatacaagcggatacccccccggatacaatacatgaacgaagattggtaaatcacaacatatgtgtcatatgccaagatgaaggcaaagaaactgatggaaaaagctgagatggaattggtgagcttcgtgtgccacggcgcggactgaaaggccgtagatgtcaaaaacaaggccaagacgatgatgtacatgccgatgatccatttccagcgaccgtaattcaatcccgcgatgaacgtgagtccggtgaaagcgatgaaagtagccacgctcatgatgtaggcggtgacgatgacatagccttccgaacatatgttgaacaagatggtgggcaccaggttcacacagatgtagaagaaaagcacggttagattactgggatggcgcgcgcccagaaggtagctggtaaccatgcaagtcagcggcaccaacaaagtcaacacggtgctgtggttgttaacgcacaagttctggttttgcggatagcctagccaaattaagctggcaatcgcgaaagtgcaggtcaaggcaaaggtgtaaacgccgtagacacgcagccacacgacgaagttcttaaaccacacaacggcttcttcaggcgttaccatcaagggggaactgtcggaaggagcgctttccatgttgttctcggcgttctcctgctcaaccatttcgcttgttgacaaagacaacgtctagccgctacttgctaggcgatctaactcttatacacaacgcgtgagacttcctgggagttgggcgtggacacgaagtagagcaaagtgacaaacagatacatcaaatccatgtaaagacaaagcgcagctggaatgtaactctcgtattcgatacgatgtagagtgtcttgtgtgtcacagatcactgaagcgacaatgaccgccaggccgccaaacattaccaccatctcaccgacctcgtcaggaaaatagtagaagatggatgcgagaatgatgatcagggcactggacgccgtgaccagtggtcgataaaactcaacatcgcgagcgaagcgatatgtcgaaatgctcaaaacgataaacagtaacacggtactcagcatagcatagacggcggatcggtttccgaattgaaagccagaggtggtaacggctacggccgtgagtaatgtgtaaatgagtgacacgaagaggtttttaggaaattggggctcagcccaatttagaatacccagacagataacggacagcatcaggcagaacagcatcatgcgcatattacacacaacgtgttcgaggcggtcgggaagcaccagccaacagagcgcacagatgcttagaaatagaagactttgaaaccataataaaatgtaaactcgtaacagaaacacagaacgaacgacccggacctcgtccgacaattgcatgatgttgactcagctttcacaagtgatacgtgtgtctaaatatgtaatgtgtttcccaccactgcatggagaaatgacacggtacaccggaattagataattgaatacaaatgcattgtttaatcaaagcagtgaatattagcattcaaggggtcataaatgctaaccctttccagggaacaatgccactttttcatatgtttagctcgtcgtgcacgccgcagtaacaattctctttcattggtaaccggctcttcgttttgccattccttttggattatggccataatgtctgggggtggtggatcatgggtatctgaggacagagatgactcactctcatcatcataagaatcaacactgccgtttgtttcttgtgaaacaatgacaacaggctgatgctgaggggtttcttctgactggttatcatcatcttcctcctcttctgtgtagtcatcgctttcaccctcgaactttacggttctgggagaaaaacctctgtctacacgaaacatcacagtaccatcagacgttttctccgttaactcatcattttcttgccacgcaccgctttggggcccttgtagaaccgtgacactgctccacggaaagcaccaattctgattctcttgcaatactccggtaggcatcaaatcactacgtccccaacaacaactggtaggtattttatcatgagcgcgattactgcgcgtgagccagtcgtacgcaccacagagctgctcggcggtaactgtgttgaccatagagcaccaagagagatcttgcttacgggcaccgtgatagcagtagcactcactctccagacgagcctcgccacgcaatccgcggtcaaatcgcgtaatgccacggagcttaagaaagccgcatctgaacaacatttggatgttatcggctagacgaaacacgtcgctttcgtcgattctcagcacataacacacgccgcactcgtccaacagaattattccacaggtcagcaaaattccaaaattagcgtaacggccagtaacaccaagtacgtaccatcggcaacacatgcgttgattaatatactttatgagattactaaagttatcagctctcattttagcaaagggatacatttgacgtagcttctccacagtacccagaaggagcaagggatcggcctccgatcgcccaggggttttcactactacgttaacgccatgaaactcttctgcggtcttagctagaccacgtgcgtctgtcggatcgagacacaacaatttctcgacttgaaaacgaggctcggtggtggagaagggcgtttgcggatggcgatataccgattcacatgtcagtaaaccgtggtgcgcgagttctttgagtgaggtacctatctgaaagagtccgtcactgtcccagtcatacacgtacacaaatccatagcttcccagcagaaccacacacgtagtctcctggatttttttgcgatcactgccatcacgcaactgcacccccaatattcccagtgcttccaatttctctttgcagcaaagatactcgtcgaacgaacgggtttctacctggggaatatctataccagagcgaaggacgagaaaccagctacaggggttgcgcaacggaatgatagtaccagaattctttttaatatattctcgtaaacacggttgatcgtattgtcgcagataaacaccctgtaacatagtcagacaacgttggaacacgagattacgcaaactgaagacgccgtagtcgcagcgtatcacgtcctcgggacgctcatctcgctgcttcagatatgtaccccaggcttcagcggcacttctggaaagcagtgtcatatctaccttcgaaaagactcacaaagtgttcagcgacaacctcaatcgggcagtttaaatcgatatgaatgaatgagtctcgatcagagcttaatatacaagcgcctcagggctgcccggatgactgacagatgacgtgaacgcgccgaacaattcctttattggaagaatgcccgcagatcaaaactgttaatccagtcaggcgatagatcacgattcagatgcactctacgggcctccacctcgggttctgtcacatcaacctcggtgtgataagcgtccagcaacttttgaccgagacgccagcggtccgcctgagcggcttgtctttcagcgtgccacgcgtcaatatctttcagatcgtacatgctgtcttcatcgaggtcaaaaccaagatcctcccagtcgtcatcttcctcttcgtcttcttccatctgaaaaccctcgttatcacgacctatgacctcaatatcgtcctcgtgcacgtcgtcaaagtcgtcctgcattcgagggatgggtggaggcggaggcgcttgaagcgcgggagctggcagcgcgggcacctggaacgcgggcgcctcgggcggttgtggcgcgggcacttcttgttgtgcaacagcagcagccgccacctcctccgctggcacttgttcatgctgttgctgctgcggaggcggaggcgacggctgtggctgctgttgaggcggggagggtggtggcggcggaggtggtggtggaggcaaatcctcagggttgaagagagctcggcgacggcgaggaggagcaccttcgtcacgattttcatgtggacgacggcgatctacaaagtctccacgaagtacacgcgtgtgccagatagtgaacgcatcccagccgtcccacgtagtaatcatgtctgcccgaaaacggtccgggcgacacaaccagcgatactgacgaacgaaatcccgggagactccatgatcgaaagcggtaaagtgtagacgataggtttcatctaggtgaatgcaacgcaccccgcgttccaagcgtgctatagtgcgaagatggtgctcatgccggcgccgcacatacaatttcattaagcctcctttgaaaaactccgaaagggtgtcagccactcgatacacgttccccggggccagacatacatgagatgtgcgatctgtgtacggtcgaacaatgaccgtgtagatgcgtccgaatcggtcaaaaataactacactgctgacctcaaaaaaacctcccagacgataggtacccacggcacccataatgtaccagcgacagcgtagtctcagactcaggtacatttgacattctgccaaatggtaggggtcgatggcctcgaaaggccacaaatcactcagacaaccaaaattggccagtagctttagtgtatcagcgtgacgcccgggagtgtgaagattgacatctcgattgtggtacgcgcccacgcactgcgctagggaatcggcgtcatgagcctgagttaacatagcagaaactacatcatgaggcacacgagtggcatagggtgtgtaaaactgcctgtaaacacattcggcatgcaaaagcccgtagcgcgccaactcgtccaggtgctcagccgccaggatcagaatgtcctgactgggttcataaatgtacatctttgtatctgatgccatgcacatgataagctcggtttccacaaaacgatcctgcacccacatgatacatttgccgatcactgccattcgctcgcgacaacaggtaatgtcgtccagcaactgatcacgtagttcaggcatgtggctgcccggcctcacatgtacaaaccagttacagggtataccgaggcacaacacatgatcaatacgctcgcgcacccaaacacgaaccgagtcaatgttcgcctgtcggagaaacaggtccttgaaatcagccatcacgcgaagatacgtatcgtatctagcgtgacagtaagggaaatcgtccgggcgagtgaagctcggagctccatcttcccatcgggtgcgccacatgatgataacggtccggcgtttgttcagattgggacaaattctctagatcctgtcaagctcttaaaagggaaaggatctgtgtacgtcacaagccgtgactgatacaccagagcagccagaacgcgttcagtcgttctttcccgcgtagatgatttcgtagtcaccagacaatggagtctagggccggtatcttcctgatggctcgccgcttcgcgctctgccgcttccactccgacaatgtccgattcgagcacgtatgtctgctgaaccgtatcgtagcggtgtagaaccagaacattagggtctagcctctcccaagccccctggcgagggtcaaaacgctccgttaaacagagccagtcgtaatgctgctgtacgaagcgctgacgacgctcttcgcgctcgaagggagctagaagttcgtgccgacgatccatttcacgctcctcaacgtgagggcagatgcactgatgttccatgcgaatttttcgctggcgctcaggctcgaaacggcggtagccgaacaccagtttcaaaagccccatgcgaaaaaattcagtgagggtgttggctacacgccgcagattgtggttgggctcatcgagctggatggcgtacaccgctccgaaccaatccaacaccaccatgacctcggccacgaacgagcgcccaagacgcggacggcctgttactcccaggagataccagggagtagccagattagctctaatcccccaccaccagcgtttagcttcagtttccgtgaggctgctaaagggccaaacggtgcgcagctccgtaacggtcttcatgagccgcataatcaccgttccgtaaccgggagtgtgaagtttgacatcatgatcaacgattcgatctgccgtcacgtaaaagctgtccggagtagtttcattaagaaacaaaatgtgcatagtgcgtatggagcgcggaccggaacggatgagggtcggagacaagcggcggagctggttgtgaacactgtcacgatagataaactccgatcgcagcacaccatatttggctagctcttccaaatgatgggctactagaaccatgtagttttcacgagggtcgaaagcatagatgcggcagaaacgacccatgcagataacgaaatcagtttgcagatagtcccgatcattatccctgtgcggttcaggtatgagcttgagagcgtaacctaacgcacacagcggttcgttacagcagatcagtttgcgggctgcatgttgagcttgtacgagctgctggtcgcgttgaagttccacataccacccctgaggaggtcccaggcaaagacggcgaccccggtatctccacacatagtgctcgatctggggcgcgtccaaacaaaagaacaggtccctaaaatcaatcaacacctgccgatagaactgcaattcatccaccgggcgatctgaaaactcggccatggtgacacaacgatgataactcacctcggtctgttaaccgatctagcgtttggaccgataatttaaaatctcggtccgagctgccgagcggttcaccgaccaggcttgagactctcgacactctcgcgtgcggtccaagaccatgatggttcactcgtccagcctcgtggatatatagcgacgctagagacaatcattctttcctaagaaccaatgagaccacaacgcattcacagtccacaaaaacattataaaaattttttttattgaagcacacaaagattcgtttttattccgaacgcgaacatatacacatccaaaacggtttcatgctttatttacaaaaagtatttttgtttattacagccaaggtggcaaatacgaacccggtcggggtacggctggacgagggtatgggcatccttctaagatggcagccttagccgctctgtgaatcaacacttgagtataataatcgcaggtgacatcttcgccgccatcttcgtcccctccctcctcgctactactgtctgtatgcggacgggcatctgtttccacagatctggaaggtgatgaaagagatgcggcctgtgcgcgcgctcctcccccatcaatctctaacagatcatcgtcatcagattctggtacctgaggctttttgtacagcatagcgggtttggcatcattcgacgcagatgcagattcaggttcagaggcatgtccttcggcagacatactttgtctgaggtttacaatagctcgttctaataccgggttcatttgattccatatggaataacaccgaacaccctgtttcacttctttagaatgtacataatctgagagacggcgccaaaagttgtgagcggcctccacctcggtggcttggggaaagtcgcagcgcacatgaggctcccagctaccgtcggccgctccggacacttcatggtgactgttacgagagtaacagccaccagggttgaggcggcaaaaacggtcacgccgaacaagccactgaaatcgtgtctcctgatgcttatggcccattcccctatccatgtacagatagcggtcccaaaactgataggttcgatgaggacaatgcggaggcatctccaacctctcggcatcggagagagccaagctgaaacgccggccggcctgatagattttcaacaaccccatggtaagaagggagtctatgtcatcggccagacgccacacatcgcgccgataaacatcgaaatagaacagctcgccgaacgcgtccatgagaatcacccattcagcatgaaaaactcccgagggcaaaacctcacccaccacaccaaagatcaaaaccccacaacaaagacggtctttaaaaaactgcataagcttctcgaacatcaagttgtccatacacaaaaaaggccaacatgatttcaagtcgtcggcttccgcacagattaacatgggacgagtcatctctcctggggtacgcagcggtatgcattgaccgcgataacgcgccatggcacgctgtagctgacataaagaataatcgttcattcgcagatgggaaatcacgtcatcaggctgggtagtcaacatgggcatacgaaacttgcccgaatagatgctctcacagtgaagcagtccatgacgcgcgaaatcatccaacccgctggccaaaaagtagagcacattctggtctcggtccaaaacccaaagactttcataccgccccatcagcactacacgcttgctcttgctgggcggtagaaggtcatccacatacagacagctgtcatcacagtattcgtcctcggagtcctcgtccgacgaatcgccatcatcttcattgcggcggcccggccagtactgcagaacgcccaacacttccaaaggctcttcgcaacaaattaatttactccagggagagccaggcccctggcacggcgtgtcttccccaaaaacactgggaaaagtggcaaataccatccgccaaccaggtggagcagaaataggcacactcacgcggcattctgccttcagtgataccagaatgcgcagagaactttgagactcctgatgactaaacagatctttcaatgctcccagtgtccgcctaacggcgggccccgaggcgtaacgataggattggcgtaacatcctgatgtgcccgggcacatcaacccttcacgggctttattgcccttcatgtcatgacgtcgtacctgtgtgccagactgacggcttattagttatggtcgctatcctgcgaaacccgctcagttgctcgcaagccacccgccagaacgtcggaaaaacctcgcccgcaacatgaattcgagccagcacaacataagcgtgtttctctccattggagcagggcccgtcattaccggatacacgtgcgtttttctgttcgggattctgggacacttttacttgtattggaaaaaccatcagagacgacaccggacaaacagtttcagtgatgttttatttcgacatctcatgatcaccgaagaggtctttaccctcaccattcccgtctgggcgtatcacttaactactcacggcaacttaccgggctcgtggtgccgaagtctcaccttcgttttttatctaacggtattcgctcgtgccttcttttacctgctcctcatctgggaccgatacagcgtaatcatctgcagacaccctctccccgttaatctgaactacagtcaggtcataggcctgtctgtctggctggttgccgtactgtcagcatcaccgttctccatttttaacggaagtgtgaaacaatgcctgggcaacatgggcagcatacccagcgaatcgtctgccgttcttaacctggaagtgcacctgtgctccttctggttaccgctcatcatgtcggctaactgttactaccaagcaaaacgccgagcatcgcctgaccaactccacgaactttaccgatgcagtttgctaattaccattatcacaacttacgctatcgtatggtttcctttccatctcgctttactcatagacgccctgattagcataagccatgtagaaccctctagcgctctccactgggcatccattgtcgttacctgtaaatcatttacatttgtatatgcgggcataagcccactagtgtatttcacatgctgccccaccgtacgtcgcgaactgctgatgtctctacgtccattcttcacctggatttccagcaaaacgcggcgaggctacgctccgattaaaacacaacctttaaacatccccgacgagccgatagataacaagtcaccgcacctgttaaacgaataaaaaataaagaataaaacatactcagcactctgtcttagtcgcgtatacatttctcactcaaacgtcgataaaaacgctcactcaaacattatataaagtgaccgcgccactttttccagtgacgtggttacatttggcaatgtcacgctgttatattccacatcccaaagcttgtgctaggcatcatacaactcacagacaacccaactgattgttatctagttaacgaaatctgcggaactaggtaagtgcaaataacccaacagcttctcaacaaaacaggagggttaatcaagtaacgtaacgtcgattatttatccgctgctacatgttttaacagccgtcatgaccaacactaacaatacgacttgtcatctcaacggaactttcgaaacttttaaaatcacccgtccagtagccatcagcgcctacactgtactcgtggttatcggacttttgggaaacattgtgctgctcagcgtgctcgtcgtgaaacgcaagctcaagtttccgaatgacatttactttttcaacgcgtctttggcagacgtttttgccgtctgcatgttgcccgcctgggttaactatgcactggactccacacaacttagcaagttctcatgtatcacttttacgtttggtttttacgtctccctgttcatccaggcctggatgctcattctggtcaccctggagcgatacggatctctagtctggatcgccccgatcaccagaaacaaagccatagcgaattgtgtactcttttggcttgtttccatcttcttggccgcaccttactactcttttagaaacgaaagcaacgaacaccaatgcatcatgagaaactatacctggagcgttggtgaaacatggcacatagccctggatttcttaattacgctcattacatttatcatgccagtgactattgtgttagctctgagtttcaaaatggccagatggtcaacctttggttacagaaacctcaccagcagaaccagtcttatccttattttgatactgacagtagcagcagggttctggggaccttttcacctatttatgtttatagaaaacgtggcagggcagatttaccacattcaaaaggattgctggtacttacagctcagacacttgtgtagcttgatgaccgaaaccctagtgtttctacgttcagtttttaacccttatatttatatgataatcagttacaagtttaggcagcaggtgcgcagtctactcaagcgtactcagtatgatgctttggacacgactcagttagcagaaactatgcagctgaaagcgaaaggtgtgccggtgtccgaccccgcgccgcatgactgcgaatgctttttgtaaattatcaaacgtgtaaaaacaataaaagttcatttggctcacaaaagactcggtttcctgtggagcatatgcgatgacagaaaataaccggcgaacgattagcacacggccggcagcaaacacgacagcttcaacatgaccaacgccggacactgtcacataaacgaaagtctcgcgtcgtatggaatcgctcccgcagctaccattaccttatacagcattgcgggaatctgcggtgtcacgggaaatctgttaatacttttggttttgttcacgagacgcatacactggttcgcaaatgacatctactatctcaacatgatctttacagactttcttgttttcattacattacccgcctgggtttactacctacctgctgaattacacacaactctcacactatgcctgcattgctctatcatttgttttttacgtttccatttttattcaagtttatggtagcagtggctatcgagcgttatcgaagcctagtgaaaaacaaaccccttagcgtaaaaaaagccagcgtcagctgcgcgtgcatctggatcattgttattatagtgtcttcaccatactacatgtttagatcgcaacacgaaacaaattcttgcattctaggaaactacacctggcatatgaacagtccttttcgcaccacaatggacgcatccattaacatttggtcttttgtcgttccggccgtgacgaccttgttaatagccagacgaatttatgtatgtacttcaggcaacaaaaaaatgaacgccagagccagtggtttgttagaggccatggtgattagcatgttattcttcggaggacttttcaacctgaacatctttcgagacatagtttcggacacatcggaagacaataaagactgcacatatcttaagcaggaacactttattcgcatggtcggtgtggccctcgtttacgggcgcgctatattcaacccttttatgtatatgtgtgtgagtaccagattgcgccaagaaataaaatgtttgtttatgcgaataccttatgaaacactagatgcagaacacgctaaactcatggttaatttaaaaaacagaaatgctaatgtacccgatcctaaacctcgtgaatatgaatctgtgttatagaaaaaagcagactgcaatctatgtttaaaagtcatccgaatccacggaaatgcttgatagtcgccattcaagatgaataacacatcttgcaacttcaacgtcactctcaacgcatcggcaccaagccgatacatagctattgctatgtacagcattgttatctgtatcgggttggttggaaacctgctgttatgcatcgtgttagtcaagaaacgcaaactgcgatattccagcgatgtttattttttccacgcctctatggccgacctcgtcagcactgtcatgctaccgctctggctacattatgtcctcaactttgcccaactctctcgaggagcctgtatcagcttttcggtgactttctatgttccccttttcgttcaggcctggttactcatttccatcgctatggagcgatattccaacttagtatggatggcacccattagcgttaagacggcctttaaacactgcataggaacctggatcgtatctgccttcgtggcatcaccctactacgcatacagaaactcacacgacgaacacgaatgcattctaggaaactacacttggcacattaacgaaccgctacacacgtgtatggatgtggtgatcatagtatggacctttttggccccagtactggtaaccattatagcaagcgtcaaaatgagacgaacgacctggggcaatactaggttaaacgaaaagaacagcgacattcttatagtactagttgtcatgacagtgttcttttggggaccgtttaatatcgtgttggttattgacaatattttacagagatactatgataccacgaattgcgatgtagaaaagattaaacatatcatggctatgatctcagaagccattgtttattttcgcggtattacagcacctattatttatgtagggattagtggcagatttcgcgaagagatttactctctgtttagacgccagccgtataacgatttggaccccgatgccaatcaattcatgattgaactcactagccagggaagaagtagaaatagaaatgctagacaatcggaaagcaatgtaccgcaaccagaagaatgcttctggtaaaatgtttaaagccaataaactattttcataaaattgtacatgtggtctgtgtgtcattcttctgggcgggctcatgatgtaaataaaaagcttctcggggagactgttcagagtacaaacagccacgcattaggccgttgaaagatgactaccaccacaatgagtgctaccacgaattccagtaccacgcctcaagcaagcagcaccacgatgacaacgaagacaagcactcctggcaatacaactactggcactacgtccaccctgacaacgatatcaacaacttctaatgctaccagcataacgtctaatttaagcactaccggaaaccaaactgcaactaccaatgctactaccttcagttccacattaacaacatctacaaatataagcagtacattttcgacagtttctaccgtcgcatccaatgcaacatgtaattctacaatcacaacgaatattacaactgcttttactacagcagcaaacactaccgcaagcagcctcaccagcatcgtaacttcacttgccactaccattgaaaccacatcatttgattatgatgagtcagcagaagcttgcaacttaacagacatcgttcatactactagatcagtgacagttactttctatactatcatattcatactcggccttttgggaaactttctggttcttatgaccatcatttggaaccgtcgcatttcctttatggttgaaatatatttcgttaatctagcaatctccgatcttatgtttgtatgtactttaccattttggataatgtatcttcttgagcacgacgtcatgtcacatgcatcctgtgtagcaatgacagccattttttattgcgcgctgtttgccagcactgttttcctcttgctaattgttttagacagatgttacgctattctattaggtacagaaaaagcaaatagacgtttattgcgcaatgctgtttctggatgcatgctcatgtggggattgtgtttcattttagcattacctcattttatctttatgaagaaaggaaccaacgtatgtgtagcagagtatgaaccaggacttaacaatttctatgttatttttatcaatactgaggtgaacctatgcaccctagttttgccagccgcagccattatctactggtatcttaaactaaccaaagcactcaaaacccatgaacgactgcgtcataggctaacgtctctaaacatagtgttagctgttgtcattgtatttgctttgttttggctgccgtataatctcatgcttatgatgtatagcttagttcacatgcagataccttgggaatgcagctctgaaaaaatactgagacgaagtttaattattacagaatccatcgccctcagtcactgttgcatcaaccccattatctacttgctcttcggacctcgctgtcgaagcgagttctgtcacctgttgcgatgttgctttacgcgcttatgtccacacagatcctggagttccatacgtgcagagacggtgtccatcagtctcagtcactcacaggtatctgcatcatctgaggatgatgacaacgatgtgcatgatgaattgcaatttttaatttgaaacacaacatgttaaaggctcaataaacacatttgtcatagcttgcgtatccgtgtctcttcttggggaggtgctaggttattaaaacgagccacccgtttgcacatgcaacacaaaaaccgtgcacatggaacatatcacagccgagtgccaacatgctaacccgaccgtggtacatcgatatctggtggatcacgctgggatgcgccccggccgtgagtgtgacagttttattgacaacagccacggtcggggcacactccattgtggttcatgaagcatcgccgccaccaccaccatcatcgtcgtcgctacgcttgcctatcacatccccctcctctacacactttaacaacccgtcaaaatcatcacacatcgagcgcaccgccagcgccgtggggcctacccgacagcgaacaaacgctctcaacaggcgacgacgtcaacagcaaagaaaaccatacacctgcatcaccggcactcattggacaaccaacctagtgtttacgagctgcgaaaacacacccagtttcgttaaactcgaaggcgttcgaaagtggactttaaaaggacaacccctgggagaaacctcctactacggcgggtgctgccgcctcgcgcacggagagaatgcgtacatcattctcgctaacggttatggccctgccatccacggtcatgctctccgtgtggattatgcgactactaactgcacacaacctgcgattccgtttcccacacggctggagattacgtctacgcaggggcttcagagccggtgtggatcgaatcgcttctatttttacggtctggaatgttccacccagctggccttttccaccctcggagtggtggatgtacgccggtgtccctccgtactcgccgttcgaccccttcgacgatctgggagcttttgggatgaacaactacgaggactatccctggacattctagtctgtctggcgctagtcatgctgttgttcatggaaatcattcccggtcaggcgtttcgctatcccatagggacgtggcggcgagtctccgcatttccctccacattccgtctccaccgctgggtaaaacggaatctggcttctctattttccagtgaaaccgaacatcagaaaaagccctccgaggcggctgcgaaccgcacatggacagtgccgtttccatgttctcataccgtcctgctggccccgatcccattccgcctcaggcgcaccatgtcattcccgtctctgcaattccccacgtcatccgcccacaatgtgtcccagatcaccgacaatcccacacacggtacttatgagagccacaacctgccacctgtcactttgcccgtcactgactacatagaagtgatagcggagcatgctccgataatctatcgtcaagatgccaacgccgtacaggcgatgctgcttcaggccgctctggaacgcgatcataatcgtcagcacgatcgcaatcgctgctaacgcctgtcatatcgaggttggcgaggacgccaccgtggaacaagagtgccgacagcgaaacgtgctacttgccaccggacagctgacgccccacagccatcgaccgcacgtattggagttcactttctccaccaaggacagattagggtccgtacaacggctgcagctgcacatcaccggtttgcagctcaataacagaaccgttctcgaccaatctgtctattggcgcctgttttcgcgagccacgacggtcgagggtggggtaaagcaaaaagttaagctacgtctcatctcggaacaacatgtccccgcacgccactgtgagatcaccgttggcaaagacagcgggctggacgagacagagccctggggcctgttaaacgtcctcagctattttgtctggtgggtcgctatgtgcctgttagcaatagacatcattatcaacgcctaccagtggattcacaagatcaacagcaaaaaccgcacagcggtctcggtgcgggctgagatcctgcgcaacgagcgagaaatgttttggaaaaggcgacgagcgcgacacggcggcatttcggagtcgcccgtctccagcgttccgcctcgctatgcctgcaacgagccctggtccctgccgagcaccgcagccgccacggcgagcaaccagtcagcagcagcgacccctgcatcacccacacccccagaatattcctcatcatctgtatttcctccctttccccaataaagagagttgtgcattatcgaggtggtctttgtcccttgtttcgggtcactgcctttagggtccggaacgggagacatggagaaggaggaaacctggcggggtctcatggtgtactcgcatagcctgtggtgtatctgcggacactggaaggcgcacattatcatgagcgacgaggccaactcagaagaggtggcctgcagcaactggatggaggacgcgaccatgcgctggatacgcaatgctcgcgaaacccacgacaagtggtgtcgctgcaccgactggaggggacatgccctcagtctggacgaaaatcgaatttctctggttaccctgcccgcggcaatggagaccaagagcagcacatccagacacaacagcaggctgtcgtgtttcactcgcgtgttcaaaagttttcgaaaaaaagggcgctgcggtcgcgggtcaggcacggctagcaacagcagtggtgccagcaccatcagtagtcacagctggcaatggtaccgcgtaacgccaccaacgcctcgacaagcggaatgtcaacgcgctccccatccgtaatcaagacgacccgtgtgtcgataaaaaagagaacgcgtgtacagggcttcattgtaaccgtgtcgcttcttgccaataaccaagtgcactgaaacacatgcatagccaaagcgctttgaaacaatcatgaacagaccgcgggatctcatccccacgcttcatgactcgtgcacccaaaccgaactcagatggcgaagggttttaaccgagtctcatgccctgtggtgcaactgcggggactggacaccacatgtagagtgcgtagacgacgcgtatttccaactgcggtggcgcagtcgccaagagcgcaccgccctgcgctggcgcaggcaaatgcacaggttgcacaacctctggtgcatgtgcggaaactggcgggaacacgcgctgtaccgccggggacgcttgactgactcgtcatccggatcgtcagcgtcgtcatcgggtgaatcagccgaaaacacattcgtgtggtggaaatgcttgcgcaagtggaacattctatggcgacacagctatgacttctttgatattcccgtgccgcctgagtctgagcgtgaaacgcctgcgtactcggactcaggatcggagggaacgccatgtacaagcataatagagacacacaggccacaagattgtcccatcgtcatggatgtacgtccatggtaccgagaaaccgctgtgtaacctcgtcacgaagttgtgcaagcatgtgggagggtgactgtgacatcagttggaagggtgtataaagcatgtaaccccaagggactgcagaggcgactcacttgagtgacacttggctcggtgccgttgtgcatgtggcacgcgatcactgtacacacaccaagtggtgtcgctagcgcggctcgcgctgtaaacaacgcactgtcagaccttgtctgtcgtatctctatgctgtgtgctcggcgccgacggcgggctgtgactcaggagacagcaacggccggatcatctgaggccagacaggctgaacagaagcaggagcagccacagacaagctcttcaacctcgttcctgggtcgcgctctggtcctcgtcggtcaacagctcctggcggcaaaccaggcagcatgccctccgcccgcttggctgtggaaataagaacaaacgccacctagcagattctgccaacaaacaaacagcatgtgctccacgtcctacattcgtatgggcatttgggtcacattggtgattatcatgactattgtgtttttataaacgacgttatgtaacccaataaactacgcatacgctcatagtgtctgtctatgcatgtttattcaagctcgagagcagacatagaaaaccaaacagtgtatgagtataaaaacagaaaatttacatattatatcttagcagcttttgcgtctgagaactggggagaatccaggtagtatgtccaagtagcagggattcccgaatccgcgtgtgttggtatcgccaaagtggttgtcatggaatgtgcttttcatggcttgccagtaggcttccatcgttcggggtgcttctgcaggagggggacaaggtgtgtcggtggtcagttctcggtgaagatagttagcggaggtgtcccaacacgattgaagcatgtcgtcgacggtgctagttggcgccggaggtttctgtccctgcgccttgtttgtgcatgatgaccgtctacagcagaacgtagagaggaaggcattccaaccacggcggaggattctgtggaattttgtgagcgctcccatgtccgttagaaatagcaatcaagcaagcaccactgccaatgggaaaagattggaatgaagtgtggacaagtgtgtgggcttgtagttatagtctctagcacgggacgatgagaacaccatcgctggaatacttgggaaagacggaagggtcacggtcacggggctgaatgggtaaaggtcgtcggaacggacgattggcgcgagcgcgatggttgcagatgcggcgttgcatgaccgtattaggtccgcgtacgctttggggatcccaatggggattgtagtcgccggccgcccaggtgcggtacggcaaaagagtaaaggagtcgtcttcgccaggatcttcgtcttcctcgggaccgctgggaagtttccaataacgcaaatcaaagcgcagtgcgcgcgacacaagcgcttggtcactctgcggaatgggttcctgaccggcttctgctggcagagcaagagcttgggcatcgcgaacgcgccagccgtcctcgtctcttgattgacaggtggacgtgtcagtatctaaccgccatctccccggccgtgttaaaaatgcaaattgactggccaaatcacgggggccaccagagggacgtggccacagatacaaagcatctggtcgcgggcgttcccaaacataagggtcctgatcgggcagcaggcgaacagctgcctgatcaggactggcggctgcgtagcccgcagtgagagcagctaacaggccgacacgtaaaaagtgtgataagtcctcagccagggggtataccagtccatcgtacgtacagtaaccatacacaactccgagttcgtcaatgataataagcatgacagccaaagggtttttttccaataaacgaccatcgtcgtcaacctccgcacgctcatcagactttcgttcagcgtggcatttggggctgtgagtgacagttgcagcagcagcggcggcggcaggacctggcgtggccgcgggtggaacgtccgaggcgggcgcgttgtggcgtgaatgtttgtttggtttcggtcggcgttttaccgtgctgccttgataggcggcgagccgagtgtgttcccgactggggttgcgggagcgtgtgtcaaaccagttggcgcgagcagcagcccactcgctcagatattccagccacggatgtgtagtaacgatacccagtaagtgaaatgcgcagcacaggcgctcggaaataaagttacggacggctgcgacgatggaaccagcgtgtggccatttacagaaaggtagccaacgctccacttcttcccaacatgtagttaacaggcacggttgtggaggacggcccggagtttgcaagcaaatggtttggccagctgcagtgtgaccgatagctgccgcagctgcggctgcgttgggccacgtacgagacaggagttccacaggttcgggagggtggacggtgagaggagggagggttgggcatgcatacacgcgggggaggtctccaatgccgtggcgaaagaagtcatcggcatcggtagccgcgaggtgtaaagtgtgacgagggagatcaaaaagaaacactcgaaagtggcacccaatggcgagaaagaggccttcatgacggcacagggtaggcgggtcttgtggagagggactcatttcatggaccaaggtggcgacaaggacaatccagtcgtctgtgggtgaaagttgccgtagatcagtggcgccaacgtcgcgcatgtgagagcgtggagtgacaacggcataaaagttggcagggcggcccagtggtaggagttggccagtttggcgttggcaccatttgcgagtagcgcgagcagtagtgttagcaatgaaggcatcggcccaagcggtagccatgaggaggaattcatctttagtgagagcatgctgctgtggtggaatggatgcgaggcgagttcgtgtgtcgagagaagggagagttagcgtggtgggagctccgggagcatgtgtgggaggatgcattgcagaggtcggctgatgcggaggcgtaggcaaggcatgcatgaggctggacatgtggtgtagcggcgagggttgatgagggcgccagtgagttggaggagcaggcaggcggtgagagtgaggatcggggctggtgcggagacctgcgtagcggagatgctgccaggagtgtggcgagcggtgaggacgcatgtttaagtagcagtggagtggaggtgtggtgaggaacacggggacgagtgatgtaggcggacaaggggagagttgcagagcgagacggtgagagtttgggcgagtaaataaagtggggtgttggacaggcagcgttaggagagggggcgtgcgggagacgtacggcaggcagctttcctccccagggcgctgaatgcgggtctggcaggcactccggggtggcgcgctggcgtgaagggc

SEQ ID NO: 2 - DNA, 230287 bp, Human cytomegalovirus
gggccgcgtggtgggtcctcgaggggcgggggggtgtttttagcgggggggtgaaacttggagttgcgtgtgtggacggcgactagttgcgtgtggtgcggaggacggcgacggcgaataaaagcgacgtgcggcgcgcacggcgaaaagaagacgcgtgtctgtgtctgtgtgattccccggggaaaagaggaagttcccgggggacggcagcatgggtccctggggacacacgaaaagcaacgcccgggggcgagggacgacggccctggggaccgcgggggaaataacggccgcgaggccacacactcgttcctgcgaagccgcacaccccgaggccgcgcacaccgccgacacaccccgccaccacaccccgccggcacacccgccacacgcccgcgacacacccggcacgacacacccggcacacgcccgcgacacaccctgacacaccctgccaacacacccccgacacacccaacacacgcccgcgacacacccggcacacacccacccggccgcgccccgacacacccaaaacaccgccggtgcggggccgcgtggtgggtcctcgagggagtgttgagggccgtaagcgtgttgtgtccgacgctgcctgcgcactgccggtgcgtgtcgtcccacggtatttgttgtcggcaccgggcttcgggacggtgtttcggcgcgctgccggtgcgttccacggtccttgcctgtgtcgtttcggcgctgcgcttgtcgggggttttcgagcgttctggccgccggcgatgccggggtgttgcggagacggggggtgtgcgggacggtgttggggccggggacgggggttgcgctggggccggggctgttcgcgccgcgtaggggaggttacgttggggacggggacagtttgcggcgcggaccagggaacccacctcacctatttaacctccacccactacaacacacacatgccgcacaatcatgccagccacagacacaaacagcacccacaccacgccgcttcacccagacgcccaacacacgttacccttacaccacagcaacacacaaccgcatgtccaaacctcggacaaacacgccgacgaagaacaccgcacacagatggagctcgacgccgcagactacgctgcttgcgcacaggcccgccaacacctctacgatcaaacacaacccctactactcgcataccccaacaccaacccacaggacagcgctcattttcccacagagaatcaacatcaactcacgcatccacttcacaacattggcgagggcgcagcactcggctaccccgtcccccgcgcggaaatccgccgcggcggtggcgactgggccgacagcgcaagcgactttgacgccgactgctggtgcatgtggggacgcttcggaaccatgggccgccaacctgtcgtcaccttactgttggcgcgccaacgcgacggcctcgctgactggaacgtcgtacgctgccgcggcacaggctttcgcgcacacgattccgaggacggcgtctctgtctggcgtcagcacctggtttttttactcggaggccacggccgccgtgtacagttagaacgtccatccgcgggagaagcccaagctcgaggcctcttgccacgcatccggatcacccccatctccacatctccacgtcggaaaccgccgcaccccgccacatccaccgcatcgcaccacccacatgcttcgcctcggtcagatcacacgctttttcctgtcccatctacaccctcagccacggttcacaatccccgaaactacgccgtccaacttcacgccgaaacgacccgcacatggcgctgggcacaacgcggtgaacgtggcgcgtggatgccggccgagacatttacgtgtccaaaggataaacgtccctggtagacggggtagggggatctaccagcccagggatcgcgtctttcgccgccacgctgcttcaccgatatccaataaacccatcccctcgccacgacgtctccgcgtatctttgtagcctcaagaatccgtccccacgtccacccatcccgagcactccacacgccataacaaaccacggacacgacaaatgcatgcaaacttctcatttattgtgtctactactctgtgttgctacagggagtgaagagggtgaaggcaaagaaaaaaaaaaggaacaaaataatagattagcagaaggaataatccgtgcgaccgagcttgtgcttcttttcttataaggaggcaaatatactagggaaaacataagaataggaagaaaccgaggtttgggagaaaagctgagataaaatagcgcattttccatacagaggttgttgtttttgtggatcctaagaggtttcaagtgcgaatctcaaagttctcacgagaatattgtcttcaagtatcgacaactgtggtccaagatttttttttggtctttttaggttctgcgagggacatcacgatggatcgttgcgatgaagtcacgcgtacgcctctggtgtggcgcggtgtcgtgacaggagagtgtgttttcagtgcagagctgtcttgattcctatatccgagtatctgttttctcgtaaggacggtaatcttctttggtgtaagtacatctaaaagctgcaaactatattttaagggctgtctctaggtgtactttgatgctggagtttttcgctgtgttgatgtgaataaatctactactactattatatgcagaaagagtgattatgccgagacaagattgcattggctgaactgtttcaaaaacgcctacactctacttatccgtaaacctaaggtaatactatgtgtaagttgtttttttttctttttgtagtaaaatggtgatacgtgcaattaaaactgtattccatgtttccatcctttcatttcaactttaaaggcggctttgagagcgaagaagtgcgaggataaaaatggatgactccttcgtgtccagggagtcgactactgcaacgctgattgattaaaagatggtctccgatgatgatgttgttattgatcgaatcatggtgcagaacggcgacggagaggagcgtgtccgccgccgggaaggtggtctctttctcttttcttttttcaagaaatcttccatgtgtttatcgtagtgatcgaaatcgactgatctcgggttctttttgttggtttcttttcggttaatcatgtattgttttctttttttacagaaagatactttttttcatgagcaattcctcgcccggcgccggcatgccgaggtggggccactgcgatcagcggcatgccgacgccgacccggggatcttggattcaccgttttctctcttctctctctacatacagaccgggtggcaggagcggtaaggaatcatcgtcgtctttcattcttcgatgattatggtaatactaaatcttatctaggagcatatacatctaagattggagtactagtagtcgtttgtggtttctatttttttttatatttatctatgacagtttttctgtttttcgttttgataataatataataaaaactcatggacgtgaaatctggcttggttgtggtgatttcattctcattattgttgttttctttccgtcttgcggatgaagatgttgcgatgcggttgttgttggtgttgctatacaccgagagagatgatctttttgttcttctggttcatttcctatgattgtttggctgctgaccgacgcgtcaggatgtgcagggcatgcggggaatcaggaccggacacgggataatttcatctacctatacggagatcgcggtcctcgccatgaggatcgcgacaggcgcgtcgagggggcaggaacacccttgcggattgacattcttggtggtgtttcgttgttgtcggtagttgttgttgacgatgaggataaataaaaatgaccttgtttttgttctgttttctcttgttgggaatcgtcgactttgaattcttcgagttatcggaaagctgaggtacccaaatgtctgtagcttttttctttttaccctcttgtttatcatctgcgattcgtggtaggtaggagagggaaatgataatccgagattaaggaaaggagaagataaaaaataaaaaaaaataataaaacagaagccgaccggccgccgacccgttccccaggaccagcctacgaggaacggataacgcggtggcgacggcagcggtggtggcgctgggggtggcggcagtggtactgctgatggtagtcgggacggaggagaggcgatgcatacatacacgcgtgcatgctgcatgggtggatggtacggccgggagacgcggaagagaaactcacataaaaaggtgacaaaaagagcggttgaaaaaagaaaacaagattcgaccagacagaagagaaggaccggggcttggcgacccttccacgactgctgttgtcatctcggctcctccgtcttctcccggccacgggcggctaagtcaccgccgttctccccatccgtccgagcgccgaccgaccagccggccgattcgcccgccggggcttctggagaacgccggggcagcagcgatctggggaagctgctaaacccctgcgtttttatatggtagctctgccgagcgcgggctgacgcgttgggtaagcggaaagacgtgtgtgacgaaaaggggtcccatggtatttcacgtgacgatgaggagatacggtttggagcacatacggtttagaaaaagggagttgtcgtgacaagggctgagggacctctgtctccatgtgtgtataaaaagcaaggcacgttcataatgtaaaaaagaacacgttgtaaacaagctattgctgtatcattcggctgactatgcttcattcggactgattttcttttcctaacggcgtaacttaaagtgattaacgtatgatatttgttccccagagttatactatagtcatcatcctaaaattcagatataaatgaacacatgtcgtatgggattattaagaaaccgaaactctccacagttcaccatcttcttcgtcattcaaccgatgacccactccgtacaacgaatcagtctgctgcgtcatattgcaaagcacaagcgacgtatgcgaacaacttgaaacacaggctgttgtattgacgaccgttgtaccattattagtcaccaccgttatcccatgtttcccacccgatggaaaaccgtcttctatcatcaactgtggtaagatttcgaccctgcgaggtattcagtttcctcatatccataacctggattttatcattaaaccccaatattaaacacttttttagtaccccccacccaccaaaaaatgtgactggaccggttcctagcagctctgggagccatgttcaggttgaaccacagctacagcgaaaccgagtccagtgaccggtaaccacgtccagcccctgcgtatgtaccagtccaagcacgtccggtcattgttctacacaggaaatctaactaggtcaacgcaattttattccaccgttacgcagaatactaacaaaaaaacacacaaatttaacgaattacacgtagtttattacatgaaaactgtaagaacaccaattcactaagcgatacaacatttagctgacttccaagtgccacacatcaccactgtattcatccatgttttcaccgaaccaacgagacagatcgaagaagccagaatctcccgactttaaattacataaatccaacgtattatgaccacagctcgacacacaaatagttgcgttactattcacagtagcattacctatacccgtaacgttgcacaaccactgatcaccattgttaccaaaaacggttttccacttagttgtcaacggatctttcctatgcgtaatggtaaaattactaccagtcgtcgcttttagctcattacgagtattatccgcatccacatatatcaacgtcatagctaggcacgctataagtaccccccccccacaatggaatgttgccaaaccggttctttcccgttatagccatagcgttcccaggcaaaagcaaacgccaaacctaatgcagtgaaaagcgcttgcagccagaaccagcttatgtaccagccacaatcacatccggttattgtttccacaggaaatcctaccaggcaaagccccgcttgttttgttcctatcttgtttagcaattcgtaaactgtcagcctagcgacgtccgtttagatcaaaagtcacgtatatagcgacgctgtttccatccgtttccccgtcccgccgtttccgaacaacccacccgggttcagacaaccgaccaccaacagaaatatacacacagaccactgggagttcagttaaagatttcatcaggtttattttggctgctgctagtcttttgcttcttagaaaaaaaatacccatatagagaaataatgatagtttgacaacacatatggcagggatttcttcttcatcaataagatatgcaattcccccagggagagactttcaacaattgaatttacaaaaacaaaattacatcaggagaaagagaggatacattaataaatatattatatctggtgtatatactgaatgctgctggttcataaggtaacgatgctactttttttaattccaagatggtttttctttgttagtcttttgttgacttgctggttcctaaaagttcgcaaaaacgattgtgtgaagattttatgacgttggttgactagttcatgagattctgctgtacgtgtgatggttattcgctggttcgttctaagatgagtatcgtactgtgtctgcgatggtcgtctcttactggcattctctcggctgcctcttgctttcatgattgaaaaggaaaaaaggactccgagggcgcggtcatcttttacttttcggttttctcgttggcgggtcagaggtagtcagatcatgagactgtcgtggtcgatgaaactgtgtctgctcaagtgacgtccatttcttgtacggagaaaaaagtcatcgggataaataaggctatacaaggcgttgtcaagcgtgcggctctaaacaaattaagcgatacaaaattacagtaatacgaataataaattacccccctccccctgtggtcccccgagacgagagccacccatcgtgtactctcgcaccacccacgaccacagagggagacgggacgaagagacgacgcacagcgccatctcctcctggaggccggcgacgttaactgctacagctgcggcggcgaagacagctgcgatttgtcggccgacatgccgatggtatgggcggcggcggcaatggccgcggcagcggggaggagaggagagagaagaggagcggggcgtccgaaggcgaggatggcatggtctcgccggagcgcccggcttttatggaacactcgcgtccggttgggtatcacccacaggaagatgagtcacaacttccaaaccatcttgagacccgagtaacggtttacaggtcgcacgccagtcagctaaaaacagcggacagtcccacgctgtttctgttgtggctctctccagtttcctcatcaccgtcccggtctccgtcgtcatcggaagaataccacccgctctcatgcggcagtcgatcggcctcgacgaacgagacgcggcgacgcctctccacggccgactggttgtggtggtgaaagaagagcaccagcaatcccaggaggagcaacaagccctcacatgtccaggaggtcggggagagggcctgtcggagatggccgtgaggcatcacgtacggcagctgaggagaaacggagaagaaaggaaaattaccgtcaggggccggggttcttattagagaaacagcacgtaggtcaggatccagatgctaatggcaatcatgatgacgatgatcatgcaggccaagacgcggcgcaccaatgccgaatccaatagccgccgtgcctccggttggtggccggcggcatctagagacatgatttgggggggaccggcggcgcaaaaagacagggagatggacagtgtcacggtgttttgttataattaggacatggggaccggaagccgagacagagtactacagggtgttgaagggtaacgtgagggagatcatgtcatgggcgggctgaagaccgtgcggggaggattgacgtgtgcggtgcttgtggaacacggtgttttaatatgtatccgcgtgtaatgcacgcggtgtgctttctggcactcagcttggtaagctatgtggccgtctgcgccgaaaccaaagtcgccaccaactgtctcgtgaaatcagaagatacccatttgacgtgcaagtgcagtccgaataacacatcatctaataccggcaatggcagcaagtgccacgcgatgtgcaaatgccggatcacagaacccattaccatgctaggcgcatactcggcctggggcgcgggctcgttcgtggctacgctgatagtcctgctggtggtcttctttgtaatttacgcgcgcgaggaggagaaaaacaacacgggcaccgaggtagatcaatgtctggcctatcggagcctgacacgcaaaaagctggaacaacacgcggctaaaaagcagaacatctacgaacggattccataccgaccctccagacagaaagataactccccgttgatcgaaccgacgggcacagacgacgaagaggacgaggacgacaacgtctgataaggaaggcgagaacgtgttttgcaccatgcagacctacagcacccccctcacgcttgtcatagtcacgtcgctgtttttgttcacaactcagggaagttcatcgaacgccgtcgaaccaaccaaaaaacccctaaagctcgccaactaccgtgccacctgcgaggaccgtacacgcacgctggttaccaggcttaacactagccatcacagcgtagtctggcagcgttatgatatctacagcagatacatgcgtcgtatgccgccactttgtatcattacagacgcctataaagaaaccacgcgtcagggcggtgcggcgttcgcgtgcacgcgccaaaatctgacgctgtacaatctcacggttaaagatacgggagtctacctcctgcaggatcagtataccggcgatgtcgaggctttctacctcatcatccacccacgtagcttctgccgagccttggaaacgcgtcgatgcttttatccgggaccagggagagttgtggttacggattcccaagaggcagaccgggcaattatctcggatttaaaacgccagtggtccggcctctcactccattgcgcctgggtttcgggaatgatgatctttgttggcgcgctggtcatctgcttcctgcgatcgcaacgaatcggggaacaggacgctgaacatctgcggacggacctagatacggaacctttgttgttgacggtggacggggatttacagtaaaagatgcgtgtcgcctgccgaagacctcaccatctcacgtacaggcatacggcgtatacaatcataatattctatattctgcatagagttacatgcaacagtactactaccaatactgcatccatcacatcacccaacactgcttctaccacctttgtgaccagcgtattttctactccgaataacaacacatcaacgacgccacacacatctgtcacctcacaagcgtcaaccattggcaacatcaccaacgttacctccgacttgagtactttcacaaccgtatattctacattcaatacatcatatgctaatatatccaatacggctgccactacagaattgatttcaacaaataccaacactatattatcttttaccaacgtaacagcaaacgctacatcatcttataacacaacaatcaccgtaactatcacgtcagatgaaacttcgcacaacgtatccactaatactgcacttataagcacgccatggcttacaaattgcagcgccacaacgtacaccacgtacaaccgtactaactcttccaacgcttgtcacacagagacaacaatcatacgtttcaaagaaactaatacaacaggaatagaagggagtaatgtcaccataaaaggtaattctacgtgggattgtctttcagtcgcctggatacgacattacaatcgatccacacacggacatcatctaggtcatcgtaagaacgcacatacccaatcttggtattggttacgcatccttacctctcatactgtatgtcattctcaacatgaaagaccttcactgtaccatgacttatgtcgttcgtgcaacaacacagaactacatctgtacgatctaaatatcaccaattccggcaggtacagcagacgttgttttaaagaaaattacttcacaggacatcacgaagatgaaaatttctacctattagtaacaccaaaaaatcatactgaagctattaatgctactttcgtttgccctagatacaacaccgatatcgaaaatgaagatagagagaaaggaagtcaacatactaacaatacacatcaccacaaacgtaatctctatcatagctcgcaaagaagccgcaccgtatggaccatcgtgttggtttgtatggcctgcatagttctgttttttgcacgacgagcctttaacaaaaagtaccatatgttgcaagacaccgtcagtgaatcagaattcattgttcgatatcacacagaacatgaagattgagctacgtttccgggcagacatcttatgaagctgaacaataaactaaaacattctgtaaggctcagcgttcaaaggaatattaatgcccattgagcgagaactaatattgcaatggactggcgatttacggttatgtggacgatactaatatccgcgttatcagaaagctgcaatcaaacctgttcctgtcaatgtccctgtagtactaccgttaactattccactagtactgagacagccacatcaacatacagtacaacagttatcagcaataaaagcacttcagaatctataaattgctctactgcaactgcaccagcaaccaccgtttctacaaaaccgtcgaaaacaaccacacagatatccacaacgacaaatacaaacgttgagactaccacatgtaccaacaccaccacgaccgttacttgtgatggtttcaattatacagtccataaaagatgcgaccgcagttacgaggtaatcaacgtaacaggatacgttggtggcaacataactctaaaaaatgcaatcagactgagaaatggcacaatgtagactggattcattatgagtaccccacgcataaaatgtgcgaattaggcaactatcaccaaacaacaccacggcacgacatatgttttgactgcaacgacacctccctaactatctacaacttaaccacaagaaacgctggaaaatataccaggcatcaccgtgataacggtcaagaagaaaattactacgtaacggtgttaattggagacacaacgttatccactcttggcacatgccctgtaagatataaagaatctaggaacactgaaaacaccattggaagtaacatcataaaaaccattgagaaagctaacattcccctgggaattcatgctgtatgggcaggcgtagtggtatcagtggcgcttatagcgttgtacatgggtagccatcgcattcccaaaaaaccgcattacaccaaacttcccaaatatgatccagatgaattttggactaaggcttaacatgcacatcaataaactttttttaaccaataacatgtctctgtttttttttgttaacaacctatgatataaagcggtatattcaatcattactaaacaaaaaaacatgggcatgcaatgcaacactaaattgttattgccagtcgcactaataccggttgtaatcatcctaattggtactctagtgcccatacttttacatgaacaaaaaaaggcgttttactggcgactttttctgcaaagtcaacatgtagaagcacccattacagtaacgcagggagacacagtctacctagatgctagcaataatccctgtaattattccagcttttggtaccacggtaattgcgaactttgtggatggaacggatatctacgcaatgttacacattactacacaaacacatcgtgttccccgcaattcatgtgcataaacgaaactaaaggtctgcagttatataatgtaacattaaacgattcaggtgcttatactgaacacgtttacgaatgtgatctttcatgtaacattactacttataacgaatatgaaatactcaattacttcgataactgtaactacaccataaatagcaccaagcatattatcaccgtggtgtcttcacgtcattctaaacaaacaaattcccacgtatccactcacgctggttgggcagccgccgtggtgacggtaattatgatctacgttttgatccactttaacgttccggcaactctgagacacaaactacgaactagaaacaacgtaaatcgcatagcgtgattacaaagtatcgacactaatttatccaagataaaatttgattactccgtgcggttctcaaaaactgtaaggtcccgcttttctactccatcatgaaggatcgcaatagaatactgctatgtatcatctttatttgcatcatgtgcctcatttgtatttactttaaacgtcgttgtgttcttactccgtctccagacaaagcggatctgcgagtggaatttccctcgttacccccgtgtatcggcatacaatgtgctgcatgagaacacgcgtgacacatagcgtacccctggacggtacagtttatgataacgtcattcaggggaagtatacattactatcgacgtgttatcacagaacacacagattttctgcgtgttttataaaagagcgtctcgaagcagcttgagccacactacggtccagatgacgagcgtaatcaaaaatatgccgcgcagtagtcgaaagccgtactgagcgtgcgaggcgggtagggtgccgaacgacggatatgcgtcgttgtcatcttcgactataaggatcgcgaccgagtcttcggccatggtaaacgtcaccctgtgtggctggtatgtagcgtatccggtttggaattgttctgctccagctcgggggatagtgaggaattctcaagggatacgggacccaatgactggataagagaagggtttttccccgtaagatgatcctcgtatcacatgaggtctggatatgtataaatgaagagtgaaataggcacagggaatcagatgccagcctcgtgatgcagccgctggttctctcggcgaagaaattgtcgtctctgttggcttgcaaatacatcccaccttaagcgatgagtccataaagcaccgttgtccgggtacggtgaaagtgactcggattgtagcacgtcccttttttttgtttttgtatcgcttatcgccactgacagtgcaatattttgatcgtgaggctgagtatggttatgatgcttagaacgtggagattattaccaatggtactacttgccgcgtactgttattgtgtttttgggacttgttcaatcggcacgacgactgctcccgtggaatggaagtctcccgaccgtcagattcctaagaatattacttgcgctaactactcagggaccatcaacggcaacgttacatttcgaggtcttcagaacaaaacggaagactttttgcactggttgttagggtggggtcataagtccatctgttcgttcttcccgaaactccagggcaactataacgaacaacattacagatatgaagtagcgaacctgacgtataactgcacctataaccgcttgacgttgctaaatctgacgacggaaaacagcggaaagtactattttaaaagggaagatgcgaatttcaccttttattactcttgttacaacctgaccgtgtcctaaagaacgcacgtgaagttccacagagccgcgtggctgtagctattgtgtttacgttgcttttgaaatgttaagcgtccctacggcgctaacatgtttctaggctactctgactgtgtagatcccggccttgctgtgtatcgtgtatctagatcacgcttaaagctcgtgttgtcttttgtgtggttggtcggtttgcgtctccatgattgtgccgcgttcgagtcctgctgttacgacatcaccgaggcggagagtaacaaggctatatcaagggacaaagcagcattcacctccagcgtgagcacccgtacaccgtccctggcgatcgcgcctcctcctgatcgatcgatgctgttgtcgcgggaggaagaactcgttccgtggagtcgtctcatcatcactaagcagttctacggaggcctgattttccacaccacctgggtcaccggcttcgtcttactaggacttttgacgcttttcgccagcctgtttcgcgtaccgcaatccatctgtcgtttctgcatagaccgtctccgggacatcgcccgtcctctgaaataccgctatcaacgtctcgtcgctaccgtgtagctagttagccagctgtgtatagtttgttgtgttttgcttttgcatatttgttttcagtcagagagtctgaaacggggtgggagggacttttacgggtaatgcatgctaagatgaacgggtgggctggggtgcgcttggtaactcactgtttgaatacgcgctcacgcacatatgtagcactcaacatgttagcttttgcccgcacgccccggggcgtgccgagctgcctttttaataaagtctgggtttccagatacgcgctggttctgattttgatggtttgtgcctctgaaagctctacgagctgggccgtgacatccaatcgactgcctaactgtagcacgataactacaacagcgggtcaagacgctgaattgcacggtccggcaccgttaagctgtaatgtgacccagtggggacgttacgagaatggaagcacacccgtattatggtgcactttatggggatcacgcacgcgagtctcattaggacaccgtgtagcgtttggctgttcttggaaaacattttttatttataacgtttctgaaagtagtggtggcacttattatcaaaaaggttacaactgcaccgacaaacatataacactatcttgtttcaacctaacggtggttcctcgagcggttcaaagcacaaccaccgtaatgacacccacggtggttacaaactccacattcagtgtgtcacttgttgcgtcgagactgacgacaaattccagcgcgtttagacacgctagttatcaacggcaacagcgtgtcggaaacgggacgttatccaagaacataactaacttggcattcacctacggcagctggggcgtcgcgatgctgctgttcgccgccgtgatggtgctcgttgatttgggtttgcctcaatcggcttggcgacgctggcgaagccacgtggacgatgaagaacgtggtttgttaatgtaggaaataaaaggcactgtttgagcatgactgtttccaaaccgtaacgtggtaaataaatcatggcttccgacgtgagctcccatcttctaacggttacacaatcccgttggacaatacatcatatgtacaataaactgttgattttggcgttgtttacccccgtgattctggaatccatcatctacgtgtctgggccacagggagggaacgttaccctggtatccaacttcacttcaaacatcagcgcacggtggtttcgctgggacggcaacgatagtcatctcatttgcttttacaaacgtggagagggtctttctacgccctatgtgggtttaagcctaagttgtgcggctaaccagatcactatcttcaacctcacgttaaacgactccggtcgttacggagcagaaggttttacgagaagcggcgaaaatgaaacgttcctgtggtataatttgaccgtgaaaccgaaacctttggaaactactacagctagtaacgtaacaaccatcgtcacgacgacaccaacggtgatcggcacgaaaagtaacgttacggggaacgccagtttagcaccacaactacgtgccgtcgctggattcttaaatcagacgcctcgggaaaacaacacgcacctggccttggtaggtgttatcgtatttatagctctaatagttgtttgtattatgggatggtggaagttgttatgtagtaaaccaaagttatagtgatgtgctttttatcagggagaaggttttgtgccaacaatgactaaccctgggctatatgcatcggaaaattataacggaaattatgaacttacggaagccgccaatacagcacgtacaaatagcagtgactgggtaacgttaggaaccagtgcgtcgctgttgagaagcacggagactgcggttaaccctagcaacgcgactacggttactccacaacctgtggaatacccagctggggaagtacaatatcaaagaacgaaaacacattattcttggatgctaattattgccataattctcatcatttttattatcatctgtctgcgagcacctcaaaaagtctacgatcgctggaaagacaataaacagtacggacaagtatttatgacggacacggagctgtgatgaactacaatgtatagatacacgtggctgctttggtggataacaatattgcttcgtatacaacagttctatcaatggtggaaaccagatacaacgtcatgcattcagaaaacgggatatgaaggtcaaaacctcagtctgcctcctagtaatgcattatcatctaaagactatactttttcatggtataaagattcacttaaagcccttaacatgttatgttattatactgaaaaacttgaagaaatagatagcaagccagatactatacgacgatgttttttgaatcatacattgtttcttattaatttaacaagtcactatagcgggatttactacttcgattctctatacacatatggttgggtattacggacacctctatgttacaatgtcactgtatattccatatatcaaacacacatccacacaactatattgctctatccgcctacgtccacatataattcattaactatatcatcatttacctcaaccaacttaacacataccgcggtccactatgccgccggtaacgttgaagcacaacacgatactgccaccccacatacaatgtggatcatacccttagttatcgttacaacaattatcgttttaatttgtttcaaatttccccagaaagcttggaataaattcacacaataccgatacaacagtatgctcaccgccgcttaaagaatcaccgtcgagaaaactaaaacgtaaaaagaatggccatgtacgtttatttttcagctcactgtttgaataccgtaaacataatgacgtacatatacgtgattatacaacaggtgtttgtgttatgcggcgactgattaaccatatcgtgaaccatgatcttttccgatggtccgtcatgaccgcaatgatattttacaggtattccgaaacctgtatggaggtcactgtcagagtaggtgatccagttaccctcggtagtggacatggttatcatccaggacaaaaagtacactggtataaccagtcatgcgtcggcattagcaacggcgaaaatacgcatcctatctgcacctacgaccctcctaaacctggtagacgaaagacaatgaaaaccactccgttaccatcaccactgttgtacgagtgtcacaattccacattaagcattcttcatgtaaacgtctcagatcccaaaaactattgcaggcgaaaatgtccaccaaacggtaactgtgaatttcccacatgttttacgttatcactgatttccagaacgacaaccaccagaaaacccggacaaaaaactacgttgtcgcgattaaaaaccacgccaaataaacatacgcagcacaaaagatccacgcgaagaacgtcacctagagattacaatgtaacgggtctgccgaaaggctttgcggactcgtttaccggtaacgtagaggcacatagagccaaagatgccgcacacagcgcatggatcctcattgtcatcatcattatcatagtcgtcattttatttttcttcaagattcctcaaagactcagagagaaatgggacaccagaggatacctttacaaaggaaccgacggcctgcccactacggactacttatcgtgagcggacggatatctccggtttcaaacccactgtttgaatatagggacagtccctacggaacctgagaacatgtggaaatcacctgtggtagaatgctgctcaggtacattacctttcatcgtgaaaaggtactttacctagcgatcgcatgcttctttggtatctacatcagtttccacgacgcatgcattctggtacctgctaaagtaggtactaacgtcacattgaacgcggtacatgtgcatgacggtgactatgtgtactggtcttttggtggaggtggagctaatagattaatgtgtcgctatacaccaaggctagacgaaattcacaaaaacaccaatcgaagtttttcatgtcttacaaatcacagtctccttctcatcaatgtaacggaagaatatactgattactatcgcaccatgaccacattcgtacatcagtcccataattggcacaaccacggcaacaaatggactttagacacatgttattatgtatacgttacccaaaacggaacacttcccactaccaccaccaaaaaacccactacgaccacgagaacgacaactaccaccacaacaaagaaaacaaccaccacgagcacgacaacgaccaccactaccaccaagaagacgacgacaagcactacccatcatcgacactccaatcccaaagaatccaccacccctaaaacccacgtagaacttcacgtcggtttaggagccacagcagcggaaacaccgttacaaccaagcccacagtaccaacacgtggctacacacgccctctgggttttagcggtcgtaatcgttattatcatcattatcattttctactttcgaataccgcaaaagctgtggctgctctggcagcatgacaagcacggcatcgtgctcatccctcaaaccgatctgtgagcaagtcgcgtaggaaatgattgcatgaaatcactgtgaaacgccaactccgtgccagctggcgcggcggacaggcctttgacgtatttgaagccaggcgcgctctcgataccgaaaggatccgagggggctttccaaagccgacgtccctgattcccttcataaagctgttgaccggccctagaaagaccaagagcatgctgtgggcccactgcggtcgcttcttgcgttatcatctgctcccgctgctgctgtgtagactgccattcttactccttttccagcggccgcagtgggcccacggcttggacattgtcgaggaggacgagtggctacgggagatacaaggagcgacgtaccagctgtccatagtgcgccaagccatgcagcacgccggattccaagtcagagcagcgtcggtcatgacgcggcgaaacgccgttgacctggaccgaccgccgctttggtcgggatcgctcccgcatttgcccgtctacgatgtgcgttccccgcggccgttgagaccgccgtcatcacagcatcacgccgtatcacccgaactgccgtcgcgagacgggatacgttggcagtaccaagagctgcagtatctggtggaagaacaacggcggcgaaatcagtcgcgcaatgcgattccgagaccctcgttcccccctccggatccaccatcgcagccggcagaggatgcacgagacgcggacgcagaacgtaccgaatcaccacatagtgcagaaagcaccgtcaggcacgacgcgagtgagaacgcagtgcggcgacggcacgaaagacggcgctataacgctctgacggtccgcagccgggactcgctgctcctgacgcgaatacgcttctccaaccaacggtgtttcggacgcgggcgtctgagacatcccgcgggaagcggtcccaacaccggcggaccgcgacccggcggtgcgggactccgtcaactacgccaacaactgacggtccgctggcagctgttccgcctacggtgccacggttggacacagcaggtctctagccagatcagaacccgctgggaggaaagcaacgtcgtgagccagacggccacgcgagtacgtacgtggttcgtggaaagaaccacgttttggcgtcgcacgtgggttccgagacagaacccggcggccgaagcgcaagaactggccgtcataccgccggcacccacggtgctccggcagaacgaggaaccacgtcaacagcttacgggagaggagacaagaaattcaacgcacactcaacgtgaagaagtggaggacgtttcgagagagggcgcgagagaagggaatgatgggagccgagcaagtggaaacgacgagagaaggaataatgcgggaagatatgatgatgatcatgaggttcaagagccgcaggtcacttatccagcgggacaaggagaactgaataggaggtcacaggaggagaacgaggaaggtggaccgtgtgaatcgccgccaatgacgacaaatacgctgaccgtggcctgtccgccccgagaacccccgcatcgtgccctgtttcgtctatgcttaggactgtgggtctcgagctacctggttcgacggcccatgacgatttagaatacaccgagccattcctttatttccccccatccccggtcgcttatgcgtgttaaacactaccaataaagataatctgccaatcgcaccttatatataatatgtggtcgcgtgtggtctttttaaggagctctgaaacacagacaggtatgggcggtggtcggctgccgccgctgtggctgccgctactgatcgcctggagcgagtggggcaactgctgcctcgatgcgcctccggtggtgcgttcgccctgtctgcagccggtgcgcgaccgcaaccgcgagcggaacccgggctcaccgcagttgctgccttacggcgaccgtctggaggtggcctgcatcttccccgcgcacgactggccagaggtctctatccgagtccacctctgctactggcccgagatcgtgcgttcgctggtggtggacgcacgcagcggtcaggtgttacacaacgacgccagctgttacatcgccggcgggcgctggcgcttcgaggacggcggcgcggcgcagcggctgagcctctcgtttcggctcatcaccgagaccgcgggcacctacacctgcgtgctgggcaacgagacccacagcctggcgaccgagaccacggcgctggtggccgacgtgcacgacctgcgccactcggaccgctcctgcgacctggctttcggatcgcgctcacagacgcggtacctgtggacgcccgatccctccaggttgcgcagtataaactgcggttgggagggtgaacggcaccgcgtagtccactacatccccggcacctcgggtttgctgccctcgtgcgaggaggacgagcgcgaactgtgcgtgcccttcatcagccagagcattgcggacaacaactgcagccgccggcatcgagttgacggcgctaggcggcgctatcatctacggagggattactggctgacggatccgaagatcgggttgctggccgcgggatcggtggccctgacctccctctgccacctgctgtgctactggtgttccgaatcgtaccggcgtctgaacaccgaggaggaaagcgaggcggcggaggaaactgccgcgggagaagcctctgcggtagcggcggcggccgtctctgaggaagagcagcggcgggagtaaacgaggagagccatgaagcggatgattcgcagtcacggcaggaaaacggaatgtcagatgacgagcgccggcgagcgacgcggctccgccgtcggtgcgcccatctgcggcagcggtacccgacgcggcagcggcgccaacgaacgccgcgactccgacgtcggtcccatcgcccacagtagcggtaccagacgcggttcggcgaatgaaacgtccgcctgtacgcggaccgatcaccagaaggcggacattgggctgtggttcatgtttctggtttttggactgtgttcgtggttggcgatgcggtatcgcgcacaataaattttgaatcgatgtcaaggaacgcgtgttttgtattttattgggaatattggcggggataaacctgtttcggatgtttacccttaatcttaccggggacctcgttgtcctctcctccttcttcctcggacaccgggctccatgctgacgtaggtaccgactggggtcaaaagcctgggtacttatgaggagcgcgcacaaaggaccgttaggcgccggcatggagcgtcgccgaggtacggtaccgctgggatgggtgttttttgttctttgcttatctgcctcttcctcgtgtgctgttgacctgggtagcaagtcctccaactcgacctgccgcttgaatgtgacggagttggcctcgatccatcctggggaaacgtggacgttacacgggatgtgtatttctatctgctactacgagaatgtgaccgaggacgagatcatcggcgtggcttttacttggcagcataacgagtctgtggttgacctgtggttgtaccagaacgacacggtgatccgcaatttcagcgacatcaccactaacatcttgcaagacggactgaaaatgcgaaccgtccctgtgactaaactgtacaccagccgcatggtcactaatcttaccgtgggccgctatgactgtttacgctgcgagaacggtacgacgaaaataatcgagcgcctctacgtccgattgggctcgctatatccgagaccgcccggatccgggctcgccaaacacccctccgtaagcgccgacgaggaactgtccgcgaccttggcgagagacatcgtgttggtctcagccatcactctgttcttcttcttgttggccctacggatcccccagcgactgtgtcagcggctgcgcattcgcctgccgcatcgataccagcggttacgcaccgaggactgaacggataaccgcaaaggccacgtgcaacgttcacgctgctataagaaggccatgtcccccgtggacgggtctctttgacacgagcgcggcacgccgttgccacgagcatggatcacgcgctcttcacacacttcgtcggccgaccccgtcactgtcggttggaaatgttgattctggacgaacaggtgtctaagagatcctgggacaccacggtttaccacaggcgccgcaaacatctacctcgacgtcgcgctccgtgcggcccccagaggcccgccgagattcccaaaagaagaaaaaaggcggccgtccttctattttggcacgatttgtgctggctgtttcgacgacttttctttcctcgggaggactcagagccactgatgtcggatccggcacggtctcccgaagaggaggagtaaacaacacacggctaagaggatacatcatcaaagaagataggaggggtcaaaacgcggactgaaagtatataacgccgatcatgtccgaggaactgttaataaaacgccatgatgacaatgtggtgtctgacgttgtttgtgctgtggatgttgagagtggtgggaatgcacgtgttgcgttacgggtacacggggattttcgatgatacatcgcatatgacgttgaccgttgtggggatttttgacgggcaacacttttttacctatcacgttaattccagcgataaagcgtcaagtcgggccaacggtaccatttcttggatggctaacgtctcggcggcctaccccacctacctggacggggaaagagccaaaggtgaccttatttttaaccaaaccgagcaaaacctgttagagctggaaattgcgttgggttaccggtcacagagcgtgctgacgtggacgcacgagtgtaataccacggaaaacggtagttttgtagccggttacgagggatttgggtgggacggggaaactttaatggagctcaaggataacctgacactatggacgggccccaattacgaaattagttggttgaagcaaaacaaaacgtacatcgacggtaaaattaaaaacatcagcgagggggatactacaatacaaaggaactatctcaagggtaattgcactcaatggtccgtcatttatagcgggtttcaaccccccgtcacccacccagtggtaaagggcggtgtccgaaaccagaatgacaacagagctgaagcattctgtacatcttacgggttctttccaggggaaattaatattacttttattcattacggtgataaggtgcccgaggatagcgagcctcaatgcaatccgctacttcccaccttggatgggactttccatcagggatgttacgtagccatcttttgcaatcaaaactacacctgccgcgttacacacggtaattggacggtggaaatccccatcagcgttacctcacctgacgacagttcctcgggggaggtccctgatcacccgacagctaacaaacgctataacaccatgaccatcagcagtgtcctcctagccctgcttttatgcgctttgctattcgcgttcctgcactactttaccaccttgaaacaatacctacgtaacctggcctttgcgtggcgctatcgcaaggtccggtcgtcatgaccagcaacgccctgtatgagctgtttcgacgtaggttaccgcgtgcccccgtcaacacggtcatgtttctcacgcgacgcactcgtgatgggttctgcggtcggttgacgtccatcgccacgaattcccactacactatgttcgtgttagatcacgggtccgtgcgcatcgagcgaccgagtcagtcagaagtggattgcgccagtttaatggaaacgctgaagcggattcggttacgaaattcgtgggtagcgtcagaagacgagctagatgtgagtcgcggggacgcgtgacacaaaacgcgttcaggattaacgtaggttttcgaaataacctacgtccgtgagtgacgcggtttcgtgttgaaacccgcgccggttctcacggtggtttatgatgaaaccggcgttggggatctacgcgggttcctcattcaacctgcgaaaagaggaagttgcggtaaaaccacgtcaataaagacgtcaatgacacctcaatgttgcgttggaacggtctttatatatacaaacgccgttatgttcagtgtccggcaagatgctcgggatacgggctatgctggtgatgctggattactactggatacagttgataacaaacaatgacactcgaagcaacaataccgataccatctttgtatctctccttaccggggccaacggagttactcgcacagccatcgggggtctgcattcaaactacaccaacttaaccgaggcattcagattcactccagcaaacacaacaactaactcttccacggagggtaattggagcgtgactaacctaacggagagttgcatcaaccgcggtgagtcctatctaactaccatctggcttctgaactgcgctgacaacaatacttattggtactctggaaatgcctataaccatacaattgacacttgtaaaaatacagtttcgggatatctcttcttcggcatgtgccagctatggaaagattgggttactaatgcttctcacgacactgtcagaattcagtcgttgggaaatgaaatacgctgcatgctgctccctagacagtataccctcaacgccacggtggaatggtacaacaaatctgaaggtgacgtaccagaagaatttatggactatgttatcctgacccccttggcagtgcttacatgcggactgcaggaagcttatatactcgacaagggtcgtagatacatgtatttgttttccgtgtcctgcgcgggaatcacaggtaccgtatctattatactcgtctccctatcgctgctcatcctcatctgttactatcgctgtggccggcttctgatatgcccacgcggctttgaactcttgccagaattcactgaggaagaggaggaaaaagaaaaattgttaacgtacaaggacattgaagtccaggtgcctatccgcacgcggcggctgctcgtcccttggatccgggagagcaaaatgtgggtactaccacccccgctgcctccacgacctccccacttaatagaattcccgccgtctcctccgccgtcgcctgggcccatgcacatggtggtctgcatgccagcatgacggactttgaactttgagccccaagcggtacggactacatattttccataaatctacactgaacttgagcacaaaaatactgacaatggactgaatatacagacttttatatgatccttgtacagatgtaaataaaatgtttttatttaaaactggtcccaatgttcttcgggaatcatggggtggggacgggggacgcggtaaggagcaaaaccgggtacatgggggggaacatcgtccagcagtagcaccagcggattgggtaggggttgctgcggaggtcggtcgatgacgatgtcgatctccatcggcagatccggcaacatctcttcgtctccctcaccgaccagcactcggcgctgttctggatgtatatgattttggaaaagcctccgacgagctcgcggcgcgtagaaagccaagcggcgcaagggccggcgagcccgaaagtccatgcgcacagatggcatgagtccttgagtgacggtggtgagctggggaacagggctacctcccatcgcgacggtgacagtggatccatgagagaggcgccgcacgctgcatggctaaataccgtgaatcccctgacgtcgtctttcgtcccgaacgcgtcatgttgggggcgaggcgtaaaccgtcgaggttgaaaaaccgcgtatctgcgacccgtccggactacgttgtttttcagaagcggccacatgacctcgagatgtcgtcacccaaggtatttaacggcacacagccagacgcgttcgtcagcagcgacgccgacaagacctcagcatggctcggaggctatggatcttgagcttactagccgtgaccttgacggtggctttggcggcaccttctcagaaatcgaagcgcaggtaaacggaatctggggaattcaacacaggtaagaaatacaaaaaataacgtgattgtgaacgcggttatcgtgtttttgcagcgtgacggtggaacaacccagtaccagcgctgatggtagtaataccacccccagcaagaacgtaactctcagtcagggggggtccaccaccgacggagacgaagattactccggggagtatgacgttttgattacagacggagatggcagcgaacatcagcaaccacaaaagactgatgaacacaaagaaaatcaagccaaagaaaatgaaaagaagattcagtaacagcagaccccaagggttaacgattatgttgactaccttgttttttattaaaaagctgtaaggttttgctctaaaaacaccccgcctccggtcttttttcttttgtattcggcacgcgaaacacggtttcttcccatagcctgtctaactagccttcccgtgagagtttatgaacatgtatctcaccagaatgctagtttgtagaggctatgcgggatgctgcggcggcgcgaccttccctctccacccagccccgtcaaaacacacgcgactcgagcggttcgtatgaaaaataaaaaacagctttttatttacaggaacggggaaaaaaaaggcacacggtccgtgggagacgcgggttcacgcgtcgtcaaaaagttggtggtccactccgtaaggacaggtaggcttatttagcttccgcatgctcctggttccgtaataaatgccgttttcgtggcagcgtgtcatgccgcgagtcacaaactccatcaaactgtcggccacgatgcaaacgtgctgattgttggcagcaaagacgcgcatacagtcgtccacgaagaggttgatcacgtcgtaggggctcaccaaccagcctaaaggttccacgtggttactgccgaccatgaccctccagtcgttaatctcgctccagtcgtacagccgaatcgtggagacgcgaatgacgctgtaatcacccatgaccatgagtcggccgcgatacgtagcacgccactgcgcgaacgcgtggatgtgcatgcagccggccagcgctctaagcgaggcggtgtgcggcagctcctctgggacggtgatgaagttgcagcgtcgcaaaccgatgttgagaaattcagtgatgctctcggccacaaaggtcaacgagtcagagtagatgtggtcggtccacaggtacatggcgcccgaggcgcccaggtacagttcagacggcacgttgtgatcgcccttgtgtttaagaaagttgtaggtgcagatgctgccgacgaaacgcagcggctcggggcagcagaggtagctggccagacgctgtgcatcccgtccttcgtcgcgcaccaagcgccagcgacgccggataacgaggcagcggtctttgggccagaccagggccacgcgttgcccgggtttccacggtcgcgacgtcttaggaggcctccagcggtcgagcagattgagaaaacagtccttgattaccgacatcgcggtcgcgcgtcggtggacaaaaagaaatcgggccgatccggaaaaaaaaaacgacggcaaaacaccgccgtgctcgagcgaagggtggcggagggccagaagaggcggccttgacggcgttggcagcgaaaaaattggcacgcgagtcaaacgggaagtagcgtcggtgttttatgccccaagcagcgtcgtcgtcactcgtggcgtcacagtcaacggtgctgacgtcctttggggcagtcgggcacgcgatcgtagatgccgttgtggccgctgaaacgtcggttttcaaacagcaggttaagtcccagacacatgaacgtgttgagattatctcccacccggatgtagcggtcgtcgcgcacgtcgcaggcgtagacggccccggtataggcgacgacgatggggataaggtcgacgggccagcgcaagtgaggaaagggcgcgttctcgcccttgaggctgacggttcccaggccgagaacgcgcattccgaaagcggttttgatgttgcgcagcaagtgaccgccttccacgctgttttcgaaacacctgaggttgcatagacgcagttccgttcccggcgggtacgtcaacggcatgaactgcccgtggtggcggatgatgaatcgcgccatggtatccaaaccgaggctccaggcgcgcaacagcgggcgaaagtagcgcttaaccaacgacgaggtcaggtagcgcatgcagtgcagggtctcgacggcgcgcagcccgacgcgcgcaaactccatgaggttgcgggccaggtagtagacggcggtgtcctcgcgtacatagcaaaaaacatagccctcgtccgagatgaggcacacagcggtcttcttctgctgatccggcgacaacacgccctcgttcacgaagcgacccacgaaggccaggcgcgtctggcaacacaggtagtgactccaagccttcacgtcctccggtttgaagtcctcgtccgtctcgatctcctgcagcactaggttccagcccggcggccagaccacgggcaacacctggcctgcgttgatgcgcacgtaagcttccagacagcccaggccgaactcggccgtgagcgccaggctagccagatcgctcatgtgacgcgccgagtcagtgggcgagcccgggggcccgtcgcacaccacgctccgtcttcttgtcctcaccgcggccagcgtggcgaggacactttccgcgcccgaggctgtatcttcggtttgcccgccggagccggccctcactatataacgtcccgcccgggtctcctccatgtatgcaggtaagcaactgagccgaacgcacctcagcagacgagaggatgtcgtcgcggcgtcgcagctcgtcacgtcgctctggcgaaccctcgacggtgatttatatcccctcgagcaacgaggacacgccggcggatgaggaggcggaggacagcgttttcacgagcacgcgggcgcgcagcgccacggaagatctggatcgcatggaggccggtttgtcgccctacagcgtctcctcggacgctccgtcgtccttcgagctcgtgcgcgagaccggcggcaccggcgccgccaagaaaccgagcgaaaagaaacgatcgtcgtcgcgtcggcaaccgcagatcgcagcgggcgcgcctcggggctcgccggcgacacccaaggccggcaagtcgcctaaagtctcgcgaccgcctagtgtgccctcgctgcccgagaacggcgccggcggcggtggcgacgataacagcagcagcggcggtagcagcagtcgcaccaccagtaacagtagcagaagtaccagtcccgtggcgccaggtgagccgtccgctgccgagggcgatgagttttccttctgcgacagcgacatcgaagactttgagcgcgaatgttaccgggtcagcgtggccgacaatctgggcttcgagcccagcgtggtcgcgccgcagcacgtcgagtatctcaaattcgtgctgcaagactttgacgtgcagcacctccgccgcctcaacgaatgcatacccatgccggccttcgcgctcaccagcctcgtcgaccccgtcttaaacaacgtagcgcctggcgagcgcgatctcacgcgtcggataatcacgcacgcggtgatcatcaactattactacgtggcgcaaaagaaagcgcgccacatggtggaggccatacggaccaccgtgcggggcgacacggtacgccgggtagccgcgcaggtcaacaaccagagccgttcggggcgtgcggccgcgctagcgcttcattttctcacgtcacgaaaaggagtgacggacggccagtacgccacgtctctgcggcggctggacgaagagctgcggcatcgcggcacgcccgaatcgccgcggctcaccgaggtttaccagacgctacgcgattacaacgtgctcttctataccgcccactacacctcgcgcggcgcgctctacctctatcggcaaaacctgcagcggctcaacgagaaccaccggggcatgctccggctgctttcggtcgaagagatatgcgaagagcacacgctcaacgatctggcgttcctagtaggcgtcgagcttatgatcacgcactttcaacgcaccattcgcgtgctgcgctgctatctccagcaccagctgcagagcatctcggagctgtgttacctcatctatgtacaactgccgtcgttgcgcgaagactacgcgcagcttagtgacgtgatctactgggccgtcagtcaaaactacgactacgcgctctacgcgagcacgccggcgttgtttgactttttacgcgtcgtgcgtcagcaggacgccttcatttgcaccgactacgtgtactgcgccctgcgtctgctggcctgtcccgacagacctattatcggtgacaccggcggcagcagtagctcccaacgcctcgtaggcgagtttatggtgcgcgatccgctgttgcgcgacccgcgcgccacccacctgcgccagaaactcatcacccgcgacatatgcgtggcgcggttgcaagcgcagccctcgagtcgacacattccggtcgaacacacgggtgtctcctccgtcaccctgctcaaaatctttagccaagtcccccccgacgaacgcgaagaagacacgttacgcgagatggctcttaaagcgtttatggaagcgaacggtaatcaccccgaacaaatctgccgatccccaccacccccgctgccaccgcgcgactatcctcaacgcgacgagcgggaccgtcaccgtcgcgaccgccgcgacagcggggaatactgttgctgatggtgggacgaaacagcagggcggaacagtttatgatagaaagtcacaggaaagtatgtgttgttttttttttaatgtaccaagaataaaaagtgcgtctacgaccaaagcggtgtgtggacgctcgtcctctctgtcttctccgggtttttttttcacgtgttttttccttcctattttgttacggcaacagcgctgatggcacgttgccggcttcgaacatcgcgtcggtgatttcttgcttgcccggcgtcacacggtgacgtagcagcacgcggctcacgtagcaggccgactcgcggatgacctggccgtcggcgtcgcgtcgcaggcccgagcggttgccgtgacgcagtctgccctgcgcagcgcgctccacgtcttcaaagtagctgtgtagcaggccgcgctccagcagctgcggcagcgagtcggcggcgcgcactacaaagttctcacggctgatctcgtagcacagcacgctgccgtcggccgccacgccggccacgctgcggtcccaactgaaaaggttggcgagtccgatggtgccgatgacgcgcaactgaccctgggtcaccaccagcagcttccagtattctacgtcgcgcggggtgaggatggtctcctccacgtcgcagacaaacaacgtgtagccgcgcggatagggcagatccaggtggcgaccgcgctggcggcgcataaaatcgtctaaattcaaaccgccgtcgggtgcgcgcctactcgtcatcgccgcgccttgtcggtcgatgaccccacggtgcttataacgcgccgccgcggcttcatgtggcgtgacctccgacctcgtgaggccgaaaacggcgtacatgaagacgctcaaacttttgaatgtgggcccggtagcgcaccgagggccccggggcggcgacgacggcgggcccgagttccagcggggccttgcggcggcagcggttggcgtggttgctcagctcggcgtccgagagcgccgagctgaactgcggcagccgcgtgcgatcctgcggcgcgtccccgtgtcgcagcgagtgccagagcaggcgctggacgcgcgccgtctcgggcgtcggcggcgcgcgacagccccggcgcagcttgaaaacgtgcaggcacagcagctcgcgcttgatgcgcagcgacacgctgcggtagtcgggaatccgctgcaccagctcgagaaagtcgcagaaggtctccacgaacgtgtcctcggtgaagcgaatgcgcttcagatcgtggacgtgtttgcgaaaccgcgacagttctcgacgttgcacggggttctgagcgagtcccttgcgcagcagcgcagcctcgcctttaaacagcctgatgagccgctgcacgtccccgctcaacatacgtatacacgccgtgtactcgtgacgtatactggcgcgcagcagccgaatgatacgcagggccagcacggcgttagaggccaggtacatggcgtagccgcgacgcgggttggcacaggcccagcccgcggggagcagaaagtagtcgtcgatcagcgtctgcgaccagtcggcgaagcccaggtcacgtgatacgctgtcctggacgcgggccacgtcgccggccgtgaggtggcggatcgccggcaggtgaaacgcgcccaggtgtcggttgcgctccagcctcagctcggcgtgctccaaacgggaatggtgggacgccaccgcggagggcgacaaagaggagtggtcattgccgtcgtggttaccgtcgtggttaccgccgttgtcgcgcccgtcgccgcactcgcaaaaggccgcgtagaggtccttcaatgccgcttcggctcgcgccataaacgtggcgtggaaaaaaacggcggcgcggtgcgtccggtacttgacgggcaacccgcggcacagggccgccggcaggcagcggccgatgagttcgcgctcctcgggctccagaaacaggcacagggtgccgtccaggcgcaggtacagctcctcggtcatcgagcatagctgccgcaagtaatgggtgcgcgtcccaaaggtcttgtaatcgagcaacgtgcacaccacgtattgccccgtggccacggccagagcgatgcgtttggcggcacgactgatctctggcaagtactgcgcctcgtgcaccagacggcggaaagcgccggcgttgagccagcgaaaatgctgcggatcgggcggcaagggcacgcctcgaagcgcggcccagacagcgaggtccgactcgagcgtcagaccgcggatgtcgtacttgccgtgcgccgtagcgcaggctgaatggaccagacagctgcggcgaatgtacaccatggcgtgcttgggatgtttgggcgccggcgttttctttttctgaccgccggcggccgccagatcctcgggcgtgcgacacaacaggccggcgcgcacagcctcctgtcgattacgaatcggcgtcaggtaggcgcgcaggaactggtgacaaaactcctcatcatcacgacagtcgtcgagatactcgtacgtggtgagcggatcgcgaaataggcgctcgtcaccgtcgtcatggtcttctttagcctgctcctccggctgctgggttggcagtggaggcggcggctgatccacggggttcatgactgagaggaagaagaaggtggcggcgaagcgacgcggagcgacggcggtaaagccagacaccggctatatagctagtcatcacagtctcctccttcacgacgcccccgtgccgctcacgctatccagcacgctacggcccgaaaacacgtactcgctgacgtcgtacgcgggcgatgtatggctgctcaccggtttcgcggcgacggttgcgctcgagtccaacggcgagaagcaaaaacgccgtgggcaacgaaaccagaaggagccctgacggataaaaccgcgcagcgtctcggccaacttaaccagcatcgtaccgtacagcagtacgtgaatgccgccatgcgcgtccataaatacggctttgttcacgggttccatccatccgatgactacaaaatgggcctgttctagcacgccgatcacgaaattgttggcctcgtcggcctcggccacgttccacgagccgaaagtgaaagtacaagcgggcgagccgcccaggcggatcttgctaccggcgtggagctgacatacgcgcagcagattggcgcggtcgtgcagtatctgggagagttcgtacatgcccgcaaaggtgtgcttaaaccacgcgccctctacgatctcatccacgtagtcgcgctcaaagaagctgtacacggcaaagaggccgttctcaaaaaactcgccgaacgagagccccagcacgtacaccttgtcctcgccgggcaggtacgcaaaggcgtgcccgtgcccggagacccagatctcgggcgccgtgtttgcgtccggcacgcattcgtacacactgacgaggccgataaagtacaagcggccagcctggcgcaggcacgagaagcgccggtaggtcttgtgatcgcgcaccaccccaaagtactgagtgtcgcccagcatgatgccgtgcagcggcggccagcacagcgggagccaacgacccgccgtggcgcgcacgtagcgctgcaggtgaaccccgctcgcacgctcgcgcggcttcgggcgcttgtgggtccaggcatcacgcagaccgcgccagatgctgctgaacttgggctgcccgcgcagatagagcgacgagagcgagtcaaagtagcccacgacgagcctgtcgggagacacaagagcgcgaaaatcaaacctagagcgacgacggtgaaaaaaccgaccagaagcgcgtgtctcaaacacgctactttcggttataaaaacaccgtcgccctatttctgggcgcgtgtacactgatgactcacctacgctttttgaacggcagtctcagctcgggattggcctcgtacagcgagctgcggtccacggggccgatgctctcgtagcgaaagtcgtcgatgagcagcgccagccccacgcgcacgaagcccctgaggtcgcgcgccagccgcaccaacttatcctgccccaccagcgccgcgtacacggtgcccgtgtcgccgcagagaatccgcacgcggtgaaagaaggtcttgtcctcggcgccctcaatttcgcccagcggcatgacgggctcgcgcgtgtacaacgaacgttgaaagcggcgcagcatcgaggccgagagccccagatcgcgcgccgtgcgcagcactagggaatgcttctcgggccagatgagggtcagttgcgcctcgcggtgcgcctctacgtaggcgcaacgagcggcggtgtcctcgcaggccagcaactcgcggaaagccagcagcgaacgtaggtagcggccgcgagcggaggcgcgcgagcggcggcacagctcggcccgatggtcgggatgcaccaagggcacgttaggttgcagacgcgcgcagatggattcgtgcaccgggtcgcagcggatcatgcccttggcaaaaaatccggccagatccgaggccaactcgtacaggcagtcctcttgcgcgtcgtaggcgaacacggcgccgtacgcgtccacgaacacctggtaccggcaggtggcgtgcgagaccgtgccaatgagatgcagagctcggaattcgccgaaaaagtcgttctggcagtgctccagatcgatctcggtcagcgagtgcggcgaatgctcgcccccgaccacgtagatgcactgcgagggccagcccagcgacacgcacgagccctcgaagcgccgcaagtaacgccgcaggccctcatagtcgcgtcgcacgcacaggtcggccaagtcgcgcgtgcaaaagacctcgggtaccaagcagcgtttgcgacgcggccgacgcgcgtgcccaggcagaggaggaaggcgcgacggcggcgacgacgaggaggaagacgccgtggccgccgagcagcccttgcgacggccggacatgccggcagtccgcgacgatccacaggagacaaaaaagcagaagcagcagtagcctcggcgacccgctccaccccgtcctccacacgctcagccgcgactgaacgccggggcgcgccgctacttgggtttttatagccatctgccccccgtctcgggcacccgggagcgatctacggagacctgacagcagttgggcaacacaagatagggaaatacaaagacacttttaataaaaaacgagactactttgtgtgtgtgctccgtaaactgtttattctccccctccgcttcgctctggatgggctccgggtccgtcaacacgcgactcgcgcggcaaaaggcacgctgttgacggcgcgagagcccgtcgtgatagtccatcatgccccggagatcgtgcacaaagcagctgtcgccgcgcagaaaccgacgcagcgtctccacgtgctgcagctgccggcgcgtatcaggagccgtcatcgctgatgtcgtcatcgccctgacaggcgcgtagatggcttcgcgagatcatgcgcgttttcaaccgccgtgacacatcaggtccatcttgagctggcgccgggcctcgcgcaggtgttgcacgcgttgtgagcgggaggcgagttcggcttcttgctcgaactcctgctgctcactgtccgagagggtgcgataaaaggcggcaaagtcctccaagtcggctacatgcgccctgggtctgacgctccaaagcgtacgcagtctgatgaagcggacccatcgagcgtcacggcacgccgtcttgaacgcggggcccgggaagaggttcttctccccggcgcgctcgggccggcgaggccgacgcggtttatatacaccgtctcggacggcgggacgccgagcccgcgccgcggccgctcatccggagacggcggaaaccgcgacgccggaggaaacggggaccggcaacgacggcggtggcggcgaccagattatgggggacaaacccacgcttgtgaccctgttgaccgtcgccgtgtcgtcgccgccaccgtcgtcgccgctgccgctcgtcagcttcacggagctgttgttaccgccgccgtccgtcgccgccgctgcggtggcggcgacagcgacgagcgaggtgggcgagaaaaccgcggagcaagaggtagcggctgcggatccggagaccgggaatgagagaagagaaaacagggagaacgaaggaggggagacgaggacgacaggcaccaccgcggtcaaaaggtcgcacgacggtatccctcgccaactggcagagcgcctgcggctgtgccgccacatggaccccgagcaggactatcgtctgccggcgcaggacgtggtgacctcgtggatcgaagcgctacgcgacgcggaccgcgacaactacggtcgctgcgtgcgccacgccaagattcaccgttcggcctcgcacctgacggcctacgagtcgtacttggtgtccatcaccgagcagtacaacacggcctcgaacgtgacggagaaagcttcgtacgtgcagggctgcatctttctctcgtttcccgtcatttacaacaacacgcagggctgcggctacaagtacgactggtccaacgtggtgacgcccaaggcggcgtacgccgagctcttctttctgctctgctccaccagcgagagctccgtggtgctgcaaccgctcatcaccaagggcgggctctgctcgtccatggcggtttacgacgaggaaaccatgcggcagtcgcaggcggtgcagatcggttttctgcacacacaactggtcatggtgcccttcgtgccgcacgcctgcccgcattacgccgtgcctttcacgacgccgggaaagccgggctgcggcggtgctccgagcggcgttgcggggttggaggaggcggcgccctttggacgggtcagcgtcacgcggcatggcgcgacgctgctatgtcgcgtggaccatctgacctggatcagtaagcgcgtaaccacgtacggacacaaaaaaattacgcgctacctcgcgcagttccgcggcacgatggacgacgacgaggcagcgctacccggcgaggacgaagcgtggatcgcgtccaaaaacgtgcagtacgaattcatgggtctcattttcaccgtcaacgtggattcactatgcgtggacgcggaacagcgccaactgctgggcaccgtggccacctccttctgtcaccgcgtctcggacaagatcacggcgcgcaacatgccgcgcgctttttccttctacctgctgacgagcgcgcagcgcgggtacgacctgcgattcagccgcaacccgtcactcttttttagcggcgacgcgctcaactgtccgcttctcaatgagcccaacgtgttttcgctcacggtgcacgcgccttacgatatccacttcggggtgcaaccgcggcagacggtggagttggacttgcgctacgtgcagatcacagaccggtgtttcttggtggccaacttgccacacgaggacgccttttacacggggctcagcgtgtggcgcggcggcgagccgctcaaagtcacgctgtggacgcgcacgcgttccatcgtgatcccgcagggcacccccatcgccacgttgtatcaaattaccgagggcgacggtaacgtgtactcgtacaaccaccacacggtgtttcggcagatgcacgccgccggaacaaccacgttctttctgggcgacatgcaattgcccgcggacaactttctcacgtctccccatccctgaccctccgtccgtcctcctttcccgacacgtcactatccgatggtttcattaaaaagtacgtctgcgtgtgtgtttcttaactattcctccgtgttcttaatcttctcgatcttttggaggatgttctgcacggcgtccgacggcgttttggcgccccccatgccggcagaacccggttgcggccccgtaccgctcttctggggcgacgataggtcgaaagccaccgttttcatgcccgtcgtgctcttgacgggggaacctacggcggcggtccccgtcgagcggcgtgattgcaaagccgcgctcgcccccggtttcaggatggagggggaggccacaggcggcgcattcgatacgctgcttttggccgtagacgacggtgggtaaacggtggttaccgcgggatacgtcggcgtggtcgaggcggcccggctgctgccggacaggcgacccggcgcgctaccgctcacggggaccgagggcggtcgacctaccaccgccttgccgcccaaagtaggtttcaaggaaggaacaccgacgcggctgccccggcctttcaccggagacgggggggcactcttggccggggacggagaggctgacgaaagcatggacagcggcgatgtggcgggggacacgacatcatcctccgtgggcgacaaaacggacgccgaggctgacggctgtcgagccgaagaagcggaagaggttcccgcgccagaagtcacgttccttgatgacgtcgttttagacgaagccggttgaggttgcaacagcgtggcgggtaccgtcgacggcgtgcccgacacctgtttctctagccttccctgaaccggcgtcgacgtcaccgtctgcgctcgggcggacgcgtgcggcgtcgcgactcgcttgcccagcaccggtttctggctcgtggatgtcgtcgtcattggagacgataacttagctttacgtattctggacggcgtcgactgctcgggcgtctgactgggaggcgaaatgacgtcgttgttgtaatcggacgacggtgttgtgtgtcccaggctgacgacggagccggtgtccgaggagtcgtcgtcttcctcctcgctgtcttcgaccggtgactctgcagtttggtcccttaaagcccaaacctcatcagcggcgtcccgagacgctgtttgtgtcaccgcggcgcgtggagtcgacggcctccgaggggtggtggacacggtgttttgagaagccgtggaagtcgtaggcatcctgaagggattgtaagccaggtgaggattcttgagggcccacgcgcgttcgcgcggccagttggcggggttcatatccccgggcaacggcgccgtcggagcccagggcgagttaccgttgaccggggtttgggtacccgcgaaggtaggtgtcggggccggagcgggggccgtggaaggattgacaggcgtcggcgtgaggatggcagcgccggcgccagcaggaacgttaactccggcgccgaacgtcaacgtcggttgctcgaacttgtacgcggtggtgacgggcggtttggcgctcgtctcggtatccgtgatgtccaccagcgtgtcggtgaaacgcggatcttgacggttggggggatagccatccgagctgtcggaatcctcgtcgcccgagaaaagatcccctctggtctccgtgagcggcctcacgtcccacgcgctgtcccgacggacccttcccgggctggccttggtcacctgcggggagacgagactgaaagccgcgtgacgctgttgttgttgcgggatgttcaagggaccgctggtcggtttctgactgcccgaggataacaggccgctgaaaatgctggaaacaccgccaccactagcggcgcccttgccgctagttcccggtttcttgatgggcgtaaagatgtttttctcgtcatcatcatcgtcgtcgtcctcatcggcactggagccaaagagcctccgggaggcgctcggtttacgtgccgggggcggtggttgctgctgacgttgctgcaggttctgctgcctctcctcccaagccttcagctgctgtttctcacgctgcaccacctcgtcgtccacccgtttctgccgctcgcgacgcttttcctcttcgtcgtaatagccgacggccgccgaacgggcagcgtgggcttcggcggccggtgccagagaaccatgggcctcgaagcggaacggtttgtgtcccttccagggactggcgatccagctccagccgtccagcggctgcgtggggacatgtttcttgggtaccgacgagaaggccgaaccgccgccgagcgagaggagattggcgtcatcgtcaaactccaacgacggcgagcgcgcgcccaaaaacgtgtgcgccgactgtgggaagctgtccacgtagatatcaaagtcctcgatgagcagctccaacagcgtgtcggccgagtcgccgttttccacggcgtgcttgaggatattgcgacagtagttggaatcaaaggaaaggcacatgcgcagctccttgaccagcagcttgcagcgctcctgaatgcgcgccagacatttgcgctccagctcctcccaagacctgcgcacgttcatgatgagacggcccgtgtacacgagcttgttgacggcgttgaccagcgccgtgttggcgtgccggtccaggttaaggtcgagcggtttcacgcagaacatgttacggcgcacaccctccaggttttcttcaatgcgctgcacctccgtatccttgaggtgcacaaaggcgatgggttccgtctggccgatggctgtgaccagcgtctcgcgcaccgacatcttggccagaatgaccgcgcttacgagcgcgcgttccacgatctcggcatcgtggcgcacgtccgtatcgaattcggtacggtctagcacagccaggtggtcacgcgccttaccacgatcaccgaacgggtaagtgtagccgcgacgcgccacggccacgcaacgcacctcgaactcctcgagcactgaggagaggtcggggttgtgaaaacgcagctcgcggtagtatcccaaccaaagcatgagctcgttgaacagcaccgtacgccggtgcaggcgtttttcgccacattttttcaggatcttggggtgtgcctcgagatccacgtcgggcttttgcgtgagatggcgcagaaagttgaccagggctaccacatcgcgccgctgtagaccgataaactgcaaactcatgctggcttttctccagaacccggaagcgtcgtcgccccggactgcgcccgcggtctgctattcgcccacgatggacaccatcatccacaactcggtgagcgccccacctagagggagggggggtagtttaatagcggaggcggatacgcggttttcttttaagcgccgctgacttgtttcttctgttttttcgccccgtgtgctgttccgcccagacccgcaacaacactcctccgcacatcaatgacacttgcaacatgacagggccgctattcgccattcgaaccaccgaagccgtactcaacacattcatcatcttcgtgggcggtccacttaacgccatagtgttgatcacgcagctgctcacgaatcgcgtgcttggctattcgacgcccaccatttacatgaccaacctctactctactaattttctcacgcttactgtgctaccctttatcgtactcagcaaccagtggctgttgccggccggcgtggcctcgtgtaaatttctatcggtgatctactactcaagctgcacagtgggctttgccaccgtagctctgatcgccgccgatcgttatcgcgtccttcataaacgaacatacgcacgccaatcataccgttcaacctatatgattttgctattgacatggctcgctggactaattttttccgtgcccgcagctgtttacaccacggtggtgatgcatcacgatgccaacgataccaataatactaatgggcacgccacctgtgtactgtacttcgtagctgaagaagtgcacacagtgctgctttcgtggaaagtgctgctgacgatggtatggggtgccgcacccgtgataatgatgacgtggttctacgcattcttctactcaaccgtacagcgcacgtcacagaaacaaaggagtcgtaccttaacctttgttagcgtgctactcatctccttcgtggcgctacaaactccctacgtctctctcatgatcttcaacagttatgccacaaccgcctggcccatgcagtgtgaacacctcacactgcgacgcaccattggcacgctggcgcgtgtggtgccccacctacactgcctcattaatcccatcctgtacgcgctgctgggtcatgattttctgcaacgcatgcggcagtgtttccgcggtcagttgctggaccgccgcgctttcctgagatcgcagcagaatcagcgagctacagcggagacaaatctagcggctggcaacaattcacaatcagtggctacgtcattagacaccaatagcaaaaactacaatcagcacgccaaacgcagcgtgtctttcaattttcccagcggtacgtggaaaggcggccagaaaaccgcgtccaacgacacatccacaaaaatcccccatcgactctcacaatcgcatcataacctcagcggggtatgagctttcctgttactttattcagaaagcaccagaacccgtcgccatttcccctcatatacggtacacgtccccctgatctgtcatcacggtacacagatttcgcccgactgcggacgccgacggccaatcgcgtggcgtaggagtggcgccccggcttcattataacgccacgtcggagcccctgcgcgccacaacgccgtccggcgcaacttctgtctcggcacggtacgataaaaacaacgtcccccgtcgacgttgttttctccgagcggtgatcgttcccgtccctctcctccctccgcggcccccacggcggcggcctgctcgcacggacctatactattaccgccccaccgccgtcgtcgtcatgaacttcatcatcaccacccgagacttctccaacgacgattcagtcctgcgagccgccgagatgcgtgacaacgtggcaggctcgatttccaaagcgtacaagggcacggtacgcgccgaaggcaagaagaagctgctgctgaagcacttgcccgtgccgcccggcggctgctcgcgccgcaacagcaacctcttcgttttctgcaccgagcgcgactaccgcaagttccaccagggcatcgcacagctcaagcgcgcgccggccgaactggacccccacgagatccagcaagtcacggccagtatccgctgccgcctgcagcccagtctccgcgagccgcccacgccggccgacgagctgcagacggctgtgtcgcgcgtgtgcgcgctcttcaaccagctggttttcacggcccagctgcgccactactgcgagcaccaggacaaggtggtgagctacgcgcgcgacgagctgactaaacgctgcggcgaaaaatcggcgctgggcgtggaagtgcatcaactggtagccctgctgccacacgagcgccaccgcgaactgtgccacgtcctcatcggcttgttgcaccagacgccgcacatgtgggcgcgctccatccgtctcatcggacacctgcgccactacctgcagaacagcttcctacacctgttgatgaactcaggtttggatatcgcacaagttttcgacggctgttaccacagcgaggcctaccgcatgctcttccagatcggtcatacggactcggtgtcggcggccctggaactctcacacggcgcggcggccgggccgcccgaggccgatgaaaacaacgacgagggagaggaggacgacgacgagctccgtcacagcgacccggcgccgcttcacgagtccaagaagccccgcaacgcccgtcgtccccgcacacgcgtgccgcctcacgagcaaaagcccgaagaaaacgaggaggaagaagaggagctgtttccctcctgcaaggcaaccgcagcattcctgcgggcagaaccctccgtctccaacgacgacggcaacggcggcgaacgctgcgacacgctagcgaccgccctgcggcatcgcgccgacgaagaagacggacctctagccagccagaccgctgtgcgggtcgccgcgaccccctcaccttcagtcaccccagcccttacccccgtcacgtcccccataaccccgttgtgtatttaacgtcactggagaacaataaagcgttgatttctcaagttccgctctggttttggtttcgttttcaaagggagccccatcatggcccaaggatcgcgagccccatcgggcccgccactgcccgttctccccgtggacgactggctcaactttcgggttgatctatttggggacgagcaccggcgcctgctgctcgaaatgttgacccagggctgctccaactttgtggggctgctcaactttggcgtgcccagccccgtatacgcgctggaggccctggtggacttccaggtgcgcaacgcttttatgaaggtaaagcccgtggcccaggagattatccgtatctgcatactcgctaaccactaccgcaacagccgcgacgtgttgcgggacctgcgcacgcagctcgacgtgctgtactcggatccgcttaagacgcggctgcttagagggctcatccggctctgccgcgctgcgcaaaccggcgtcaagcccgaggacatcagcgtgcacctaggcgccgacgatgtgacattcggcgtgctaaaacgagcgctggtccggctgcaccgggtacgcgacgcgctggggctgcgcgcgtctcccgaggccgaggcgcgctatccgcgcctcaccacctacaacctgctgttccacccaccgcccttcaccacggtcgaggcggtggatctgtgcgccgagaacctgtccgacgtaacacaacgtcgtaaccgaccgttgcgctgcctcacctccatcaaacgcccgggctcacgcaccctggaggacgcgctaaacgacatgtatctgttgttgacgctgcgacacttgcagctgcgacacgcgctggagctacaaatgatgcaggactgggtggtggaacgctgcaaccggctttgcgacgcgctttacttttgttacacgcaagcccccgagacgcggcagactttcgtcacgctggtgcgtgggctggaacttgcgcggcaacacagcagtccggccttccagccgatgctgtacaatctgttgcagctactgacgcaactgcacgaggccaacgtgtacctctgcccgggatatttacatttcagcgcgtacaagctgctgaaaaagatccaatcggtctcggacgcccgcgagcgcggcgagttcggggacgaggacgaagagcaggagaacgacggcgagccgcgcgaggcccagctcgatctcgaagccgatcccacggcgcgcgagggcgagctctttttcttctccaagaacctgtacggcaacggtgaggttttccgcgtgccagaacagcccagccgctacctgcgccgacgtatgttcgtggaacggcccgaaaccctgcagatcttttataacttccacgaaggcaagatcaccaccgagacgtatcacctccagcgcatctatagcatgatgatcgagggcgcctctcggcagacgggcctgacacccaagcgcttcatggaactcctcgacagagcgcctctgggccaggagtcggaacccgagatcacagaacatcgcgatttatttgccgatgtttttcgccgtcctgtgaccgacgcggcttcttcgtcgtccgcgtcttcgtcgtcgtcctcagcatctccgaattctgtttcgctgccgtctgccaggtcgtcatccacacgaaccaccacgcccgcgtccacgtacacctcggccgggacttcttctaccacaggtctcttgctctcttcttccttgtcggggtcgcacggcattagctccgcggacctggagcagccgccccggcaacgacgccgcatggtcagcgtgaccctcttttcgccctactcggtagcctacagccaccaccgacgtcaccgaaggcgacgcagcccgccacccgcaccccgagggccggcccacacacgcttccagggacccgacagcatgccgagcactagctacggcagcgacgtcgaagacccgcgggacgatctggccgaaaacctacggcatctctgaaagcggtttttcctctttttctacgtgtctgtctcaagatgagacgtcgatatcaataaaaataccgtcgacgtggtttttttaacagtgtggttttctttattgactagcgaagtacacagtttacgagtagaaaagacagggaaaggttatataaaatgctgtattatatacaaaaacatgcacataaacaaacgggaccatcgtgctcatcatcccctccttgatcagttgttcatgtaaacgtgtggcggggtgaggggcggcatgccgttggcggcgccgggaataatgtgccgtcgaccgacgtcgcacaccttgaaacgccgtcggcgcacgcagcggtcgcaggacgggatatcccagaggaagcccatgtaggtctcggggtcctcgtcgtgaaagcggtaggagagttcaaagtggtgcaacgagcccgtccgagctcgcagcttctggcgaacaccctccacgtcatcggtgcacagcgacagtgctgggctgtcacacagggcctgaagctcctgcggccacaggtgcgtggccaggggcgagtccgtcgtcaccagtttgacgcagtgcatcaggttctcggtgatggcgtcgtacaggcgactctcagcctcctcgtgcgtcatcacgtttcgaggcagcgacagctcgtcgtcgtcatcctcgtcaaacatgatcatggggtcaggggtttttttgggatgttgacaggtgggtgtcttttccagacgcacgatggcctcacgccggccgctgaaacggtggtttcggtgtcccttctttcccatgacgcaggtgaacataaccacgtcctcggccaaacggtagacggcgtccatggcggggtcgtagccgtagacgacgccgaaagtgtccaccaagacgtactggcgtacgaggaactctttgcgttctggcacctcgtggcccagcgcgcccaacaactggtggtaacaggtgatgcgcggcacggtacggatcatgagctccatggtctggatgctgccgcccgcgcggacgacgctgaaggatgtttccttgaacttcataacctctgtgttgtgggtccagaaggcgaaatgggtgtcgggacactcatcgaaagggtcgtcgatggtgtaggaagcgtagcctcgcttggtcacctcggccgacaggctctccacgtcaccgcggtagagcatgacggcgttccagtagtcgtcgtactgcaccatgggccgctggtagtcgcgcatagtgtggaagtggtcgcggtgacgaaagccgttccgcagaaagtccttcatggtgggtgccagctcgtagacgcagtcgcgcaggtcatcgtagcagtagatgccgccgcgctgcccgatgagcacgatgagttggtagcgcataaagcccggaccctcgacgaagccaaaggggtgcaggtactcctgacagcagacgtaagcacctggtagagaatagaaaaaatccacgcacgttgaaaacacctggaaagaacgtgcccgagcgaacgtcctctttccaggtgtcttcaacgacgtggggcttaccttgcgaacagacggtgcccatcttgcccacgaagggccccagggcgctgcgcgaacggagctggatgaagcagcgttcgggccaggccacgtgcagccgggtgccgcattcctgctccagaaagtcgttgagaccgttaaagtccccggctcggatggcgatgcagccgtaggccatcagcgtgtcccgtaggtcgtccatgacggactcctctaccttcgctcgccgacgctgcgcttctccagccaccgctgcggtcgacagactcctccgtccgccttcggagaactacggcgcggcggcacggcctttatagacactatcagcgttgacgtcagacgatccgatgaacgtcgttttttgtgctggaacttccctcgtcccgacaaatgtagcggaaatcttcaagcaaatcgcgacgaagtccgatgaggaggatgcaaaagaggctgagcaacgcgatgctgcccgccgccacagtacatatgctcaacaacgcccagtgtcccaaggcgcgacttttggctcggaggagagccgaacggcggtttctccacatgacggacaacgtggtccagtacgtccatcctttgcattccggtgtccagacgggaagcgttgtcatgttatttcccgtaactgtcacgttatgttttgttttgtttctcgtgagcttaacggtcctcttgagaaatcgcgggcacatgtcttgtagaaagatataatcactttccgcgtatttcgtcagtgttgacatcacggtggtagtgttttctgaagaagtagcgttgtcagtgacgtttgtttcttcccaacgtacgtatgattcgaacggactcgtgtgcgctattgcccgcaacacgtagctgtggccggtgaagttgagcgtcagttgtcccacggtcacgttcgtgtcattcctaaaacatgctacttctccgtgaacttccgtgacgtttatctcacgactctcgttcaagacacgcaggggaaaccagccttccaggtgatactgaaaaccaaatttaagcatgacgctgtgccatttccgtcgtgattgattaaacgttacattcaagggcagtctggcttcggtcccgagacaggggccgttgtagatttgcgtgtgattgcgtgtgcagtttaggtggcagttcatgctcgtggtgttggaagtgcgattaacgtccgtaccgtggtacgtacatcggaccgaaacaccgtgtcccgtgctccaaagcagcgtcaacaacagccacacagaaacctacgtggagacgacacgggactttttattgacggagactcacgtttctaccctcccctttcccgtaggtaaaaacccacgtttatcacacacgttgtttttacctgaaacccgcgcagcccgtggacgcgacaaaaaaccgcggcactagaaagaaaatgaaacaagtatgtttattaagcagcatgtggggctaataggggggataactgaggtatagcaactatgaaaaaatactacaaaaaaaaaagctgaacatggtcatctagcagcaaagttctccttctagaccacgaccaccatctgtaccacgtcgccctccccggccgtgtacacgacatccttcaccacgaccggcggcagcggcggcgacgaggacaactcgctctcgacggaggccgggacgacagaggacgggggggtggtggcggcggaggacgaaggggtggcggcggcagcgggatcttcttccgacacgggcaacggcaggctcggcggcgcggacagcacccgttgcgccggggcgtgagaaggctgagccccggtggcctggatgtgggccaacgaattggctcgcagcgagtcgcgatccacgaaggtcataggaattttcccttcgcggatccgccgctcagattccaggatggcgcgcacgtagctgttcaccgacttggcaaaagtgcgcggcccctccgtattcttgtcgcgacgcgcttccagcacctgcttttcgtagtccagctggtggaagaccatcaccaggtcgtccatagtgtgcgcgtgctgacggacgtgggagcgcacctccaccgggaacaaagcgttccaatactccagcacgatagcaccgtgccagaactgcgccatgctgggcgccaggaaaaacaggataccggagtcgtaggcgaacacgtcccacttgggcgtcatgaacaacaccagctgacgcgtgggccgcaccgaagcttcctcccaggcctcgatgaccccgaacatgatgagctcctggtccaacggggggcagtgtcgctccagccaactgatcttgctcaggttcatctgcagaaactcgtacgaagggtcgcagatgcacacgtagagacccgagtcgtgccgcagcctggctccgcgcttcatcagtttcctcaccgcgtagcgaagcgccaccttgcccaacgccgacgcctggatcagtccccccacgtccatctgcgtctgtcgccactcggcctcgtccagcaggctcatgatagcggcagtgctatgcgtggtcgtagtcatcctttctatccttctctatgaatagcagcaatagcggtaaagtcccttcttatactatcccggagtctgtggtttttttgtttacccctgcttactggtgagactgctgggggccgttgtgctgcagcatccgagctcgttgccgccgttgccacaggaaccggtgtctccgcagggcctttttgagggcttcgcaggcttctcgcgcaagtcctgagaggccctcggcgtcgatggggttcacctcgggcgtccgagcctcgttttcttcttcttcatcctccctttcctcctccgtgtcctcccgctctgtgtcctccgttacgctctcctccccggcctcggccaagagcgcggccaccaagtccacggaccgctcggtctccgagttctcaccgtcaattacgccatgttggcggcgtaaccggtgccgagaacgccgggtgagcgcacatgcttttttctttcttaaccaaggcgggagaggatcttcaaggcgttttcgctggatccagcggtagctaaagtaccaaaaggccagcaggcccacgctacctaacagattcacgtagactggagacataattaaagaaagaagtgaaacccgcgtgtgggtctcacgtcgtcttgaaacaccgtcttatatacatgaagatgccggacatgacgcgcccaagacacgtggggttttccccttaggcgacccggtttcttaagatgtttttcatcttcgcacgcgatgtactacatcaaagggtcggctgaccgaccgcattgacgcacagtttccgagtacgcgcgtctcggagcacctgacggtgagccacccaactcacgcggataggggacaacactgacgtgaggggcgattcacgtcactgacgggaataagacgggtgagggatttccacctttttcttaagtgtgactctctttacggtaaatcgcacctgtgacctcttaacccctcctccctggtacccgataaccgtgaaaaacacacaccacacgtcacgacaccgatcgattttctttattcttagtgtgatgataggtaagggcactcgtgaggatgtgcaattatcattatcaagcctttttcaaggcgtagtgatgatcgttgggcagaacccccaggctcctagcgatctgggaatagaaggaggagaacgagcccagggccagaatgcccacagtgtacatggcccaggtctccagaccgaacgtggcgggtcgcagcttcagatggtaggccacccgctccgagagttgtgaatgctcgttcaggcaacaggactgcaggtgggtgagcccaaaagcgctttcgtttacgccgcgcacgtgcaccgtctgggccgggcaatcctggtgttgcgcgcgaaagtggtcctgacaggaaattccgtctacgtggcggcgcgtgttgttacccacttcgatcaacaacgtgttatcggcaggatgatgcgagaacgcgacgacggtgttgttggaggtctggcggcaacagtacacgtcgagcgtcatgagggccatgtcgccttggtggtacacggcgtacgcccaaccctggaacacgagcggacataacggaccgtgagcggacgtcacggcggcggttgttaccgtcgtctcggcaggagaacacaataaactcctgatcctcatacacaggagtccaaccgtcagaattaaagtccgcggagccataaccgcgcaagtgaagccgatacgagtgttgctgaatttgttcattctgccgactgttgctcacgagcgttcggaggcggtgccacaggctgttggccattaaaaagtcctggcccgaatgacgacaagacagagcccgaggcgaagaaaaaggcgcccgtcatgaagacgtaggcaggggaattcccatatttttatggcttcttttaaaagtctgtatccgactccatccggcgcttttcccaaaccgtggtctcctcgtcgtccgactcggtacccaggaggtggtaagtcttttgccgcacgtagaaagctttcaacgtggagcaaaagatgagaataaagaccccgaaaacgaaacaaaccacgccgatcatgccgatgcagacgttcatgtcgacgtagccggcggtgctgttggcggtgcggcaaaagagtgtcatgtcgtgcgtgcacaaaaaacaacacacaccacaggccaggtcgtagcgtagttattattccgtagcagcaatgatggtacagtcaagcacatgctctatccccgttaccccgatgatgcttgcgtccccgttgttatattggcactgtcccggttaatcaccacggtgaacaccacggccaagaaaatgatccctaatatagcgaccactaagagagcaaaagtccatttccagccgttgtcaaagtacgcccccgtggtgggatgcatggtggcgggcatttccatcatgtccatgtcgaacgtgtgtcgcggcgacggcgaactaaccaggcagtacgggggtcgatagggcggtgggctgcagtcgggtggtggcggcggtggcgtggaaaccgtcgtcgggcacagacccatggcctgctcgtaggtggggggcgcgtcgtcgtgatcccggtcgcggagcatcggcgtgggctccatgtcggtggcagtgacggcgacggtggtaactgtggtggagacggtaccgacggcgtccgcggttcaccttcgagcaaagagccccttctttttgcgcaaacgacggcaaaacagttctctgggacaaccggtggcgcggtaagcgggtgccacgctttcagggtgggtaaaacagtcgcgggcgaagcagtagttgttgcagaaccgcaagaacccgacgcgaaagaagcccaggagtccgcgcgccagaaagtgcgcctgccgcgtctcgggatgcacgccgaagacggcgccgctctcgttcaccagtatggagatgtccaggcgctgctgcgactccaccggcacggcccgcaccacaaatacctgcagcacgttcagcgagcacgtctcttttaaccagttgccgtgggccggatcctcgtaagtctggctcccgttcaagacgaccgtcgtcagcgcctcattaccgtctcgccagctgaagatggaaccctcgcgcttcatgcacaggcgccacaaggccagcaggtcgcgcgccaacatgaactcgcgacccacgtcgccgccggtctcgaagcggacatagcccagttcttcgcgcagcggcgcgtagttgcgcaggccctcctgcacgaagccgcggaaaccggaccgcgacaccaggtacagcgattccaccacgggcgagtagacgtagacgcgaccgccttcgccgatgagtacgggtagcggtgggcggccgatggcttcgcaacgactcacagtgcccaccggcagcaggaacttgtcgcagcacaggaaggtcttctccaaacctttaatattgagatgtccaaagtaaccaacgcgtaacaggtcgcagtaggtgaagaaccaaccgtttggccagctgagacgcagcaccgtgccgctgacgcgacgaaccagcttctgcaggtccttgcgagcgtcggaggtgacagagcagcggaaggtctcgttaaccagctcgacagccagcgcgtcctccagcgtgcgttccttcatctcgtcgttgatgctctgacggcgccgccggatttcgtcgaaacgggccgcggaggcggcgaccgacgcggaggtcgtccgaacgccctctgtgacgctgccgtccggccagtcaagaaagctaaggctggcgctgcgccgcctaaagtgtccgatccgcgcgggacgtcgctgagggacggtggctggtctgctggggcgggtacggccgcgggtgtccgcggacacgttagttatacacggaattgagtcacgtggcacgttgccagctgaaaccgccgtcgtctccgccggcgttttctccatcacgggaccgcgccgtgcgcgcgttcccaggcacgcggcccgcgctctagccgcacttttgcttcttggtgttagggacgaactcgaacgttacagaatcctcgctgtcgctctcctctttcgcgtcgttgaagtaattgccggagttgcgatccaaaccgccgcctcctcctcctccgccgccgcccgatccacctttggacgtcaggtagctggtgatcttgtgctgctcgtatttttccttggaggaaagaccgtggtcgtgatcaccgccgccgccaccgctgctcattttccgcgtaccggaaccaccgccgccaccgcggtcgtgcttcttgccgccaccgccgccacctcctcccagaccgccgagacccatgggctcgttcatgagatcgttatccagacccgggccgtcgtcatgcagaccgccggcattggccagcgaagagaggctgccgccaccaccgccgccgccacgcgacttgccgctgttcccgacgtaatttttgtcgaagggatcgccacgctggaaaggttcctcggtgagaaaattctccacggcgaacagaccgttgcggctggccacgtacaacagcgtgtcgtgctccgtaactatacgcaacgtgcacggcagtttggtgacggcgcaattgagcagcgtctggtagaagttcttcagctgcacgttgatacgcatgtttttcacgccgtggaaactgacgcggttattggctgtgaattccagctcgctgccgttggtcaggataaacttgatggccggtggaccggcgtgcaccagaatctgcacggtgcccgtagggcagggcgcttttttaacgttacgcttgacgcgggtatgcggcccgatccacttaagcaggtcggccaccacgccgaaatctagatccacgtgcacggccgaattctcgctttcgcgcacaatgtcttggccgtgcacgcaggccgagctgaactccatattgaaatcgggcgcgcacatggagatcttggccgacaggtccgagatgtcctgcacgtagaacttggtcaggtccttgctggaagtcaggtacatgaaattacccagcagcggcgtggaattgttaatggtcttgggctgaaacgacttgtcagtgatgtagaggcatgagctgttaaaagtgatttttgacacgcagtgactgcgtaccgtttgcaagataagcgacggcgtgggcaagaaggtaaccgtggtgttctccttgagcgcacggatcacagatcgcagctgctggatagccgtcttgtacggcttcagccgcagcgccagcgtcggcggctccgagaggcgcgtcttgcgatccatcccggacagcgtgcaagtctcgactaaggagcgggcgcgagcgagcgaaagttttatagagagcacacacgacgaccgggaacgctgcgaagacgcccggcgtctaataatacagccgcgccgagccagcgggcccccgactaagaggcacagtacttatatactccgaccttaaagcgccagtggtaccacttgagcatcctggccagaagcacgtcgggcgtcatccccgagtcatagtagaaaaccagggccacgcactggtccacaaacacgctcaggttcacggccgccatttccacgtcgttttggatcgccggtgccgcctggaacagacactgcgtcgccttgccctcctcctggtgctgctccaaccacgcgtaattcaccacgggcacgcgcagcggcctccgcaccacggtggggaagtaacactcacggttgggcgggcacaatgaccacaccgtctcctcctcgaacacggtgccgcgcgaagcccacactgacggcgtcacgccccacagatgcgccacctcgtcgtcgggacccaccgccagaaactgacagttgcgcaatccgaactcgagcatgtcggcgcgcagcgcttcccagcgcgcgctggcgatggagagccgcggcaaccgatacaattcgaaaatgaatttgccctcttgatagatggtgcgttcgaaccactcgcagcgcggcaaacccgacttgcacaaatcgacgctagcgcgcaccgcggcaaagtacatgtgctcaaagatgcgctcgatcaagtcccaagaggcaaagtacgtgaaccctaaccgcatgagcgccgtgtgcaagccagccacgccgatgtgcagcggacgcagtttttccagcgcgctctctacccaccattcggacgccgacattagcgcgtccaagcgcgcgttgccccaaaccaccgcctcggtcaccaactcgcgcagcacgctcaaatcaaagtaacgtcgcgtgttccccaaaaccacgtcgggtagatgcagcttctgctcgtcgctacgcgcaaacacgcagcgagccacgttcaccgtcagccgctgcaccggcatgtcacactcgccaaagtggcacgacgccatatcgggactcaagcacggcggcaggcacacgctgtcggccataatcgagtacttgactacgtgatggacaaagaccaccgaggcacggcccttgagcgcgcacagcaacatctttttcagaaaatcgtccgtgttcacgaccaccttggggcacgattgctcgcagcgcgaatactctttctcgaaagccgactcctgacccaggtccgagagccgccgggagacaggccgcccaaacagcgagtagcgctgctcacgcgcacggtagcgcttcattaacacgctaggcacgttgaaagcgtagcaaacccccgtcaactccgacgtgctttctttgagaataaagttaatcacgcggatagcggccacgtcccacatgtccacaaacacacgtaccacgggtcgatgcacctccttctcgcgtatcaaatcgcagtatccccccaggcaacgaatcacgctgttcacatcggcgttaagtcgcgttacgttcaccgacacagaaacgccgcaactcaaggtactcatccacttgcacatggccgcccaactggcgtcacgcgagaaagggtcggccgagatcagaaagtcgtactgcggcacgcgatcgaaacccacggtagacatggtgaaggtggacagcgacagctgcccatcgcgacagcgcttcaacaccgattccaacacctcgccctcgaaacgcgcatccagatggaaacgatagatgcgcgagtgcctactgttctcgatagcggccgtcaacgccacggcgatgcgcaaaaacacgccgcccgggctctcgtcctgtccgtgcagttggcgacacaccttatccaaacacaaaatggccgcgtacaagccccagcaaccggccaattccacaaaacgcgccgtctcctcggccagcttgggtagatcctccatgtgacgcagcacaaaacggcgcaccgactcatcgcacagctccgaagcgtaacacagtggcgtgcggctttcacgcgcccagttggctttgaaataaaagcgacccaacagcaggtcgcaacgcggcgagtgacgaatcagacagggaccgtggcgcataatgagctgaaatagcctgaaactgcccaaaccggcactgtgccgcgacacggtgtccatctcgcgccacagcgcgttcctgtcggacggcagctcccgcgccggctcctgtacgccgcaaaagcgaaacttgccccagtagccgtgacaatgacactttttgcccatcaacatgcgcgtagcttgtatcggcggcgatactttgcagagcgaagccccgaaatcgtcctcctcctcgacactgtccagctccatcctggtcgcgccggccggattaaaggtgctcagaccgctactcacgcgtccaccgcgactgggcacggcgggaccgctgtcacgcgtcaacgacagcacagacggcgtgccgtcgggagacggcgactcgggacgccaactgacgacgccgccaccactcgtaaaacccgctacacatgctacaccgctcgatacgttggtatttccagcggacgcttccttgtcacccccgggcagcggcccctcctcgagctcgctgtcatctcccccgatagtatcagcggcgacctctgccgacgattcctccgtctcggtttccgcgctgcggcttggaatcctacctggccggcaccgatgtgcgggcaccgaggacacccgctgttcctcgtccgcgtcagccggattcataagtttacgaggaaaataacaaagaaatcaggtagatttcaataaagtgagtctagatggcgccgacaactacggtttataaagtctgtgtgcgatgtgtttttttcttctgtgtctcctccccgtatgctgtcagcgccgctcagacgaattctcgaaagtctcccaattcgacgctaaagttgtccaaacggacgacggacagtttgagttctttgtgtaccaggaacgaggtgtgaatgtcgtcagccaggcaccagcccagcttttgtatgaccccggtacacagagggatctggcgcgggcgcgtgatgcgacggttgacaaagctacagcgctcgcgggcgaactttccgcgtgcaacgtcgaccaaggtctgccagtgtgcgatgctggaggtgagcacgtagatgccgggacgtgtttcgggcccgtcatagtcatagacgatgattaaatacacgtattgcagccgtccccgggtctcttcccacgtcaggtacatgtctttcggtatcatcaacgcgaacacctccgttttgagcgtgttgtaaaggtagccgcgcatgacgcaggtgagcaacgaggtgatgcccagcgagacggtcttgacgcagcccagcgtctcgaggcggcggtgcagcagatgcgggcccaggtccagccactgcagcgcggcgcgcgcggccgaggccgtgtacacgctttcgagcaggcagcgcgtgctggccgagacgttggaggcgcgaatgcctaacaggtaaaggctaatgtagaggtgtcgcggcgagtcgcaacccgtctccatgcggatgagcagcgcgcccggctgcgcctcgaactctaccaggccctcgggcacgaagaaacgcgccgtgagcgcctggtgatcggcgtggtagagatagcgaaccgatatagtatttacctcgcgtttggctttgagcgccgtcactagttcattgtcctcgtcggccgggtcgcgcggccgtttggccaccgcgcgcgcgtccatgatggcgaggcgcacggtagatttcaaaaagttgatagagcagctgcgggcacgggccacggacaaagcggaggcgttaaataccgtgagccaattggagatcggcgcggtggatgcccaggacgtgaccgcgagcgccgtgcgcgccttcgtgggtgcgttgccgagctcgggctaccactttggcttcgtgcgtcagaacgtggtcttttacctcctaagccacgccacggtacagacggcgcgcgacccgctgtacgccgccgagcagttgcacgaacagctggaccgcttcctgcgacaccagcacgacggcggcggagacgaggaccggttgccgttctaccacaacggggccacgctgacggctttccagaagctgttgcagaccctgcgcgagatccagaccgtaatagccgaacagagcggcggcaccgcggcggcggcggacttgatcgccagtaacaacgcgtcgaccgagcgccgcggcaagaagggcggttcgagttccgggggccagcagccgctggtccgccgggtgatcacgcagctggaaacggctgccacggaggcgcggccctacgtcaattgtcgcgccgtggccgaactcctggacctgacctaccagcggctcatctactgggcctgcacgctcatgccctacgtgttgtttcggcgcgacaccgacaccgaactggacacggtgcttctgatgcattttttttacacacactaccgttcggttaacggcgatttggccgtggagtttcaaaactacgtcaagaacagcgtgcggcacatgagctctttcgtcagttccgatatcgacggcgaccagaagcccggtgccgaacacatgcgtgacgtcagctacaagctgttcgtgggtaatctgcaagcgcgtgacgccagcggcctcatgtttcccatcattagcacgcgcatctccaccgtgaacctttacctgtcgcccgaacgtatgtttttccacccgggtctgatctcgcgtctgttgagtgaggaagtttcgccgcgcgccaacctagacgcttacgcgcgcgtgtgcgatcgcgtgctggaagaccacttgcatacgccgcgacgcgtgcaacggctactagatctgacgcagatggtaatgcgactggtggaactgggtttcaatcacgatacctgcgcggcctacgcacaaatggcgctgatccagccggccagtcagaagagctcgctctttgtcagcgagattcgcgagaaactcatacagatcatctacaatttttacacgtttttcatgtgcctctatgtgtacagccccacgttcctgttcgaccaccggcggcggttgattttggagcagcatcgatccacgttgatcggctccaaggaggaactacagcacgtctggagcaacgtgacactgaacgtcaatacgcactttgcggttcagtacacggaagaagactttgaggcacatacgaagggtgccacggaggcggagcgcgagtacctgtatcgggacctgcacagcaagtggggcgtgcacctgtttaccttgcgtccgtctcgcggcgcggccggcgcggcctcgcctttgcctccgcttgacggcgtcacacgctccgacatcttacgcgaatgcgcgctcgttaatctgaacgaaggccgcgtcaactacgcctccctgctagccttcagccatcatcccgagttccccagcatcttcgcgcagttggtggtggtaactgagttctcggagatctttggtatcccgcagggcctgtttcaagccgtgggttcgccgcgtcttttcgcactcattcagctgtgccgtgtattgttgcccgagcaggtgacgctgtaccagaacctggtctccatctacaacctgaccaccttcgtcaagcacatcgacgccgcggtttttaagacggtacgcgattgcgtcttcgacatcgccacgactctcgagcacctcagcggtgtacccgtcacgcccaatgtggacctgctggccgagctcatggcgcgctccgtagcgcataacctgtacaccaccgtcaacccgctgatcgaggacgtgatgcgcagcagcgccggcagtctgagaaactatctgcgacatacgcgactctgtttcggtctggcgcgtggccgggcgcgcctctcggaggacggcgtgacggtgtacgtggaggtacaaggtcaatacggactacgcgtacccaccacgcgtttcgtagaacagttgcgcgagctggttcgccgcgatcggctgttggccgagaatctgcgcggcttgaacgagcgcctgctgagtgttcgcgtgcgcgtacgtcagatcagcagcgacacagaggaagtaagccgacacgccaagggtcaccgcacggtggcccagatgagcaaggcgctcaaaaagacggcctccaaaatcaaagtgttggaaacacgcgtgacattggcgctcgagcaggcgcaacgttccaatggcgccgtcgttaccgcggtgcaacgcgcgctagccgtctttgacgtactaagtcgcgagaacttggaacgccgcggcgcacagctctgtctgacggaagcgacgagcctactgcaccgacatcgcgcgctagcgccgatgacctggcccgcgggcacgggcgttgcggcggcggccgaagcggatcgcgccttacgcgagttcttggaggcgccctgggaatcggcgccccaaccgccgcgactccgcatgacgcccgacaccgatcacgaagaatcaacggcaggcgcgacgtccgtaccggaggtcctgggtgcgcgctacgaacccgcacacctggccgcgagcgacctattaaactggtacatcgtccccgtaagccaggcgcagcaggacatcttgtcttcgatcgacccgcccgccggctcgacatcggtgtccctgccgccggcctcgccatgaaagtcacacaggccagctgccaccagggcgacatcgctcgctttggagcgcgagcgggcaatcaatgcgtctgcaacggcatcatgttcctacacgccttgcacctgggtggaacgagcgccgtcctgcagaccgaggcgctggacgccatcatggaagagggcgcgcgtctggacgcgcggctagagcgcgagttgcaaaagaagctgcccgccggcgggcggctgccggtctacagactgggcgacgaagtgccgcgccgcctggagtcgcggttcggccggaccgtgcacgcgctctcgcggcccttcaacggcaccaccgagacgtgcgacctggacggctacatgtgtccgggcatcttcgactttctgcggtacgcgcacgccaaaccgcgtcccacctacgtactcgtcaccgtcaactcgttggcgcgcgccgtggtcttcaccgaggaccacatgttggtctttgatccgcacagctccgcggaatgtcacaacgccgccgtgtatcactgcgagggtctccatcaggtgctgatggtgctcacgggcttcggcgtgcagctgtcgcccgctttctactatgaggccctttttctctacatgctggatgtggcgaccgtaccagaggctgagatcgccgcgcgtttggtctccacctatcgcgaccgcgatatcgacctcaccggcgtcgtccgagaaagcgcggacacggcagcgacaacgaccaccgccgcaccttccttacctccgctgcccgaccccatcgtcgacccgggttgccctcctggcgtggcgcccagcattcccgtctacgatccctcgtcctcacccaaaaaaacacccgagaaacgccgcaaggacctcagcggtagcaaacacggaggcaaaaagaaacccccgtccacgacgtccaaaacactggccaccgcctcctcctccccctcagcgatagcggcggcctcttcttcgtccgcggtaccaccgtcctacagctgcggcgaaggggccctgccggccctgggccgctaccaacagctggtcgacgaggtagagcaggagttgaaggctctgacgctgccgccgttgcctgccaacaccagcgcctggacgttgcacgcggcgggtaccgaaagcggcgctaacgcggcaacggccacggcgccgtccttcgacgaagctttcctcaccgatcgtctccagcagctcatcatccatgccgtcaatcagcgctcgtgtctgcgtcgcccctgcggtccgcaatcggcggcgcagcaggcggtacgcgcctatctgggcctatccaagaaactggatgcctttctgctcaactggctgcaccacggcctggatctgcagcgcatgcacgactacctgagccacaagaccaccaaaggcacgtactcgacgctggatcgcgcactgctggagaaaatgcaagtcgtcttcgatccctacggacgtcagcacggcccggcgctcatcgcctgggtggaggagatgctgcgctacgtggaaagcaagcccactaacgaactgtctcaacgactgcaacgtttcgtaaccaagcgaccgatgcccgttagcgacagcttcgtctgcctgcgacccgtagactttcagcgtctgacgcaggtcatcgaacagcgacgtcgggtgttgcaacgtcaacgcgaggaataccacggcgtttacgagcacttggccggcctcatcaccagcatcgacattcacgacctagacgccagcgatctgaaccgacgcgaaattctgaaagcgctgcagccgttggacgacaacgccaagcaggaactctttcgcctgggcaacgccaaaatgctagagttgcagatggacctggaccgtctgagcacgcagctgctgacgcgcgtgcacaatcacatccttaacggctttttgccggtagaggacctgaagcagatggaacgcgtcgtcgagcaggtactgagactcttttacgacctgcgcgacctgaaactgtgtgacggcagctacgaagagggattcgtcgtcatacgcgaacaactgagctacctcatgacgggcactgtgcgcgacaacgtaccgctactgcaagagatcctgcagctgcgacacgcgtaccagcaagccacgcagcaaaacgagggtcgcctcacgcagatccacgacctgcttcatgtcatcgagacgctggtgcgcgacccgggcagccgcggctcggcgctgacactggccttggtacaggagcagctagctcagctggaagcgctaggcggcctgcagctacccgaagtgcagcagcgcctacagaacgcgcaactcgcgctaagccgcctctacgaagaggaagaggaaacgcagcgtttcctcgacggactctcgtacgacgatccgcccaacgaacagaccatcaagcgacacccacaattacgcgagatgttacgtcgcgacgaacagacgcgtctgcgactcatcaacgccgtactgagcatgttccacacattagtgatgcgactggcgcgcgacgagtcgccgcgaccgacgttttttgacgccgtcagtttgttgttgcagcaactgccacccgactcgcacgaacgtgaggatctgcgtgccgccaacgccacgtacgcgcagatggtcaagaaactggagcagatcgagaaagccggtaccggcgcatccgaaaaacgtttccaagcgttacgggagttggtttactttttccgtaatcatgaatatttctttcaacatatggtcggacgactgggcgtcggacctcaggtaacggaactctacgagcgatatcaacacgagatggaagaacagcacctggaacggctagaacgtgaatggcaagaagaggccggcaagctcacggtaacttctgtggaggacgtgcagcgtgtcttggcccgggcaccgagccatcgtgtcatgcatcaaatgcaacaaacgttaaccaccaagatgcaagactttttagacaaggagaaacgtaaacaggaagaacagcaacggcagctactggacggctaccaaaaaaaggtgcagcaggatttgcaacgcgtggtggacgccgttaagggcgagatgctctccaccatcccgcaccaaccactggaggccacactcgagctgctcttgggcctagatcaacgcgcccaaccgctactagacaagttcaaccaggacttgctgtcggcgctgcagcagctgagcaaaaaactagacgggcgaatcaacgagtgtctgcacggcgtgctgacgggtgatgtagagcggcgctgtcacccgcaccgagaagcggctatgcaaacccaagcctcgctaaaccacttggaccaaattttgggtccgcaacttctgatccatgagacgcagcaggccctgcaacacgccgtccatcaagcgcagttcatcgagaagtgtcaacagggcgatccaactacagccatcacgggcagcgagttcgagggcgactttgcacgctaccgcagcagtcaacagaagatggaggaacaattacaagagactagacaacagatgaccgagactagcgagcggctagatcgctcgctgcgccaggatcccgggagcagctccgtcacgcgtgtacccgagaaacccttcaagggtcaggagctggcgggtcggatcacgcccccgcccgccgacttccagcagcccgttttcaaaacgctgctagatcagcaggccgacgcggcccggaaagcgctcagcgacgaggccgatctgctgaatcagaaagtacagacgcagttgcgacaacgcgacgagcagctgagcacggcgcagaacctgtggactgatctggtcacgcgccacaaaatgagcggcggactggacgtgaccacccccgacgccaaggcgctgatggaaaagccgctggagacacttcgcgagctgttgggcaaagccacgcaacaactgccgtacctgtcggcggaacgcacagtgcgctggatgctggcctttctggaggaagcccttgcgcaaatcaccgcggaccctacgcacccgcatcacggaagcaggacccactaccggaacctgcaacagcaagctgtcgagagcgccgtgacgctagcgcatcaaatcgaacaaaacgcggcctgtgaaaattttattgcacagcatcaagaggcgactgccaacggcgcgtccacgccgcgggtcgacatggtccaggcggtggaagcggtctggcagcgactggaacccggacgcgtagccggcggcgccgcgcgtcatcaaaaagtgcaggaactgttgcagcgcttgggtcagacgctaggcgacctagaactgcaggaaacgttggcgacggaatactttgcgctgttacacggaatccagaccttcagctacgggctggactttcggtcgcagttggaaaagatccgcgatctgcggactcgttttgcggaactggccaagcgacgcggcacgcgtctctccaacgagggagtcctgcccaacccccggaaaccgcaggcgacgacttcactgggcgcctttacacgcgggttgaacgcgctggaacgacacgtccagctgggtcaccagtatctgctcaacaagctcaacggctcatcgctagtctataggctggaagacattcctagcgtgcttccggcaacacacgagaccgaccccgcgctgataatgcgcgaccgcctgcgtcgcctatgcttcgcgcgtcaccacgacaccttccttgaagtggtagacgtcttcggcatgcggcaaatcgtcacgcaggccggcgaacccattcacctggtcaccgattatggcaacgtagcctttaagtacttggcgctgcgagacgatggtcggcccctggcatggcggcgccgctgtagcggcggaggactcaagaacgtcgtcaccacacgttataaagccatcacggtagccgtggccgtctgtcagacattgcgcactttctggccacagatctcgcagtacgacctacgaccctacctcacgcagcatcagagccacacgcaccccgcggagactcacacgttgcataaccttaagctcttttgttatctggtgagcaccgcctggcaccagcgcatcgacacgcagcaggagctgacggccgccgatcgcgtaggcagcggcgagggtggtgacgtaggggaacagagaccgggccgcggtaccgtgctgcgcctgagtctgcaagagttttgtgtactcatagcggctctgtaccccgagtacatctacaccgtcctcaaatacccggtgcagatgtcactaccctccctcacagctcacctacatcaggatgtgatacacgcggtagtcaataacacacacaaaatgccccccgaccacctccccgaacaggtcaaggccttctgtatcacccccacccaatggcccgccatgcagctcaataaactgttttgggaaaataaactggtacagcaactgtgccaggtaggcccgcaaaaaagcacaccgcccttaggcaagctatggctctacgccatggccacgctggtctttccacaagacatgctgcagtgtctgtggctagaactgaaaccccagtacgccgagacatacgcctcggtgtccgaattggtacagacgttgtttcagattttcacgcaacaatgcgaaatggtgaccgaggggtacacgcaaccgcagctccccaccggagagccggtgcttcagatgatccgcgtgccacgtcaggacacaaccaccacagacacaaacacgaccacggagccgggacttttagatgtttttattcaaacagaaaccgccctagactacgcgctgggctcctggcttttcggcatacccgtgtgtctcggcgtgcatgtagccgacctgctgaaaggccaacgtatactagtagcgcgccacctcgaatacacgtcgcgagaccgcgacttcctccgcatccaacgctcccgggatctcaatctcagtcaactgctccaggacacgtggaccgaaacgccgctggagcactgctggctacaagcccaaatcagacggctacgcgattacctgcgtttccccacccgcttagagtttattcccctagtcatttacaacgcacaggaccacaccgtcgtacgcgtgctgcgaccgccctccacgttcgaacaggaccacagtcggctggtgttggacgaggccttccccaccttcccgctgtatgaccaagatgataactcatccgcggacaacatcgctgcgtctggcgccgctccaacaccgccggtacctttcaaccgcgtgccagtcaatattcagtttctgcgtgaaaacccgccacccatcgcgcgagttcagcagccgccgcgccgacatcgtcatcgagcggccgcggccgcagacgacgacggacagatagatcacgtacaagacgatacatcaaggacagccgactctgcattagtctctaccgcctttggcgggtccgtctttcaagaaaaccgattgggagaaacaccactatgccgagatgaacttgtggccgtggcgcccggcgccgccagcaccagtttcgcctcgccgcctatcacggtgcttacgcagaacgtcctcagtgctctagaaatactgcggctagtgcgattggacctgcgacaactggcgcaatccgtacaggacactattcaacacatgcggtttctctatcttttgtaaccgacactgacagtagcgggtaataaaaacaataggatttttatcgtttttttatgttacaaaacaacgtatcactttcacggtgatttattcttgctattccttttccccttgggctgtcagcgccgggtgcgcgacacggctaccatgcgcaacaggtccagcttaaaggcgcacttgtcattaaacaggctggacatgcgcgtgtacttgctcagcatggtggccaacaccgggtgggtggcctctgatatctcggtcggcagctccaaaacgacgttaacgacgtgacggtgtttttcgtcccgcttgttggccaccgtgggtcccggcgcggtgttagacatggggcaggccgtggggggaggacgaagaggaagccgctgctaaaccgccgcgcgcctgctgcacaatgtggccgccgacgtggcaggcggtctgtttaaccagcgcgcagccccgacacagcggggcgccgtcctcgctttccaaacagctgtcgcggtactcgcccgtctgacagcgcgcgcacagcaggccgtgcccgtgcgaagtgaggcgcaggagacgcgggaccgtcacgtcgcgtaccaccacagtggagtcgcaggtgcgtgccgcgcagggcagaatgacgtcgaaagccagccggtgatcgtacacggcacaagccgcgttgaggcccagcacggctttccagcccacgcgtacgcagcgctgtccaaagagcgtctcggagacgagctcgtagacgcgctgccgcaccacccgctgactgccgcagagcgagcagtgcacgagctcggcgtgcgtgttgaagatgacgctcttttcttgacggtcccgataatagaacatcgagttgagcggaaagttttgctggcagtgtagcttttccttacccaggttgaggcagtgtccgcactgccgacagaccacggccaccagcgagcgcgcgtccagatggcgctcgcacttgagtcgacacagacaccagagcggcaggtcgatgacgctgccgatgaggccgccgcgcagcgcggcgctgagtgcaaagaggacgatcttggtgggctctacgtgacgcgcctgctgtccggcgcccgcgtgtcctaccgccgcagctgccgccgtcgagcctcctccgcgcgtctcgtcgtgcagacccagtgcccgcaacggcaccaggtatcgcggacacgtgtcgcaaaacgtctgcaccgcttgtcgggccagtacgtagagcgggtttccgcagggtaccttcccggcgtaccggcgcaaggctgcgatgaggccccgcaactgcggcgaccgcggctgccgttggtgacaccactggttacggtggtatacggccaaatcagcgcgggcgtcgaagcgcttggcgcgtagtaatgctaggcacggcgagctggtggggtgaagcacgggcagccgaaggtccaccccgaaaaggaaacggtgaaggtcacctagcagcgaggcggtgacaccgtccaacaacgcgtgcagccgctcgggcgggtagagccgcagacggcgcagcaggtagtcggtgtcgtagcgttcgaaacgcagaaaggccatcgtgcggacggccacggtgtgcagacagtccatgctgtagacgtaagcgagaaacacaaagtagggcttggtcataaccatacgctgaaagagcgccgtcaccgcctcccgctcggcttgccgacacaccagccattcgcgcaggaagcgttggtagagacggtcgcccagctcgcgattcagaaagcgcttatccgtcacgaagagatgaaggacgcaagaacgtggcacgtgatgcaccagctgctgctggaggaccgccgacgtctgcgccgcaaactgcgccggtggctgcgacgtttctaccgccgcttcctccggctgcagcgcaccgcggccgatcaccagctgcacatggaaatggtcctcgtgaacgcagaggggcgcgaagagacggcgcagagcctggtggaactcatcagtcgcggtgtgcggagcgtgtcggagacgacgactggccatgaccgcgccacagcagagccagcaccagcagaagagccagcaccagcgggcccagagtcgcaaagcgcgcgggcagccacggcccagactgcggtcgcgatggcccggagcgcgctcgccaccacgatgacggtgcccaacgataaccagtccgctccaaggacggcgcgcacggcggagacggcggatgacggtgatgggtcgacacccctcgccgacgactcacgtgctcctccagaggccgacgcgcggaccctccgacgtcctggcccgccgctgccgctgccgccttcccttctcccgccagagccagcaactcctcctcctcttcatcagcgtctccctcgcttgcgcatccgcatcgtcccatacaggcctcacaacgacacagccgccacgaccccgccgccatgggtggcggcggcggccgaggcccggcagcggcgccgccagcggcgaccatggtgggagagcaactcggatgacgaggaggaggagggggagatgcggtccgagaggaccgctttcccgccgttcgcgtaagcgcggccgacatgcgggcgcgccacagggacggaccgctgccgctgtgactgcttacggtgacgtggttccggaccgccaacgacgtcgacgcggctttcttggcgtacagctcgcgcagcagattctcgtactcgccctcgttttcgggtccgaaggcgatgagctcgatgttgaagaccgacgccgaattggatttgcgcaccacgcacttcgtcagcactccgtaggccgagggcttgatctcctcgatgtccttgagcgtgacgatgagcgactcgttcaccttaagcacattgaactcacctacgtggcgcgccggcgaaacgagcttgacgggcgctcgtacaaaacagcagagggagacggcgcagccagtgtttttaaagataaaacaaggcacgtggtctgtgcggctctcccagtagctgagtagatactcgacacaatagaccgtgtctgtcttgagcatggcgtcgcacaccgagtaattggggtttttacagatgaggccggcatcggtgacgcgcagctcgctgggacccaacttgaggatacgccgcgtggcctgcaccagatcctgatggagaaccttgttcatctccatcgcaccgacgccaccgccgatttatttacccggcgccgactcgtcttttccctccaggattccgttaatgtccatgagcttgctgacgatcgccgttaatagttgcgtcttctcacggaggatctctccgtgactgcaggtcgcgcagtcgccgtgcacgtacttgaggaaggcggcgtacttctgacccgcgttcacgaaatttaagcgcgcgtccagagagggcagcaacagatcgtagacgcgcggcagcatcggctcgaactgtaatagcagatcgtcgtcaagatcgggtagcgcgtgtccgtcttcaccgtcctcgtcgtcaccacctcccccctcgagcccaccgctcgtaccagccgcgggctccgcgtcctcgtcgatcaccagcggtcgcgtcggcaccggagaatccacgtcatcctgcacgtcgttttcctcctctccgtcgtcatcgtccagaaacggcacccgctgcttagcccaggacattcttttttccgcgtcctcaatcagcggcgccgatcgccatgaatccgagtacccacgtgagcagtaacggcccaacgactccccctcacgggccccacaccacgtttcttcccccgaccagcccggccccgtccaccagctccgtcgccgccgctaccttgtgcagtccgcaacgacaggccgtttcgcgttacagcggctggagcaccgagtacacccagtggcactcggacttgacaactgagctgctatggcacgcgcacccgcgtcaagtacctatggacgaagcgctggccgccgcggcggccgcctcataccaggtaaatcctcaacaccccgccaaccgttaccgtcattacgaattccagacgctcagcctcggcacctcggaggtagacgaactgctcaactgttgtgcggaagaaaccacgtgcggcggcacgcaatccaccgtactcaccaatgcgaccaacaccactagctgcggcggagccgtcgccggcagtagcaacgtaggacccgccggcgcttcggccgcctgcgacctagatgcagaactggccggcctcgaaacctcggcggccgactttgaacaactgcggcgactgtgcgcgccgctggccatcgacacgcgctgtaacctatgcgccatcatcagcatctgcctcaaacaggactgcgaccagagctggctcctcgagtacagcttgctgtgcttcaaatgcagttacgcgccccgtgcggcgctcagcacgctcatcatcatgtccgagtttacgcatctgctgcagcagcacttttccgatctgcgcatcgacgacctgttccgacaccacgttctcacggtcttcgatttccacctgcactttttcatcaatcgttgctttgaaaaacaagtgggcgacgcggttgataacgagaatgtcaccctgaaccatctggccgtggtgcgggccatggtcatgggtgaagacacggtgccttacaacaagcctcggcgccacccgcaacagaagcaaaaaaacaacccttatcacgtcgaagtgccgcaagaactgatcgacaactttctagaacacagctcacctagccgcgaccgcttcgtgcagctgcttttctatatgtgggccggcaccggcgtcatgagcaccacgccactcacggaactcacgcacactaagttcgcgcgactagacgcgttatccacggcctcggaaagagaagacgcaaggatgatgatagaagaagaggaggatgaagaaggaggagaaaaaggaggagacgatccgggccgtcacaacggcggtggcaccagcggggggttcagcgagagcacgctaaaaaaaaacgtgggtcccatttacctatgtcccgtacccgctttttttaccaagaaccaaaccagtaccgtgtgtctgctgtgcgaactcatggcctgctcctattacgataacgtcgtcctgcgcgagctgtaccgccgcgtcgtctcgtattgtcagaacaatgtgaagatggtggaccgcattcagctggtattggccgatctgttgcgcgaatgcacgtcgccgctcggcgcggcacacgaggacgtggcgcgctgtggactcgaagcacccacctcgcccggaggcgactcggactaccacggcctgagcggcgtcgacggcgcactggcgcgacccgacccggtattttgccacgtcctgcgtcaggcaggcgtcacgggcatctacaagcactttttctgcgacccgcagtgcgccggcaacatccgcgtcaccaacgaggccgtgctcttcggacgcctgcacccccaccacgtccaggaggtgaaactggccatctgtcacgacaattactatataagtcgacttccgcgacgtgtgtggctctgcatcacactcttcaaggcctttcagattacaaaacgcacctacaaaggcaaagtgcacctggcggactttatgcgcgatttcacgcagctgttggagagttgcgacatcaagctggtggaccccacgtacgtgatagacaagtatgtctagcgtgagcggcgtgcgcacgccgcgcgaacgacgctcggccttgcgctccctgctccgcaagcgccgccaacgcgagctggccagcaaagtggcgtcgacggtgaacggcgctacgtcggccaacaaccacggcgaaccgccgtcgccggccgacgcgcgcccgcgcctcacgctgcacgacctgcacgacatcttccgcgagcaccccgaactggagctcaagtaccttaacatgatgaagatggccatcacgggcaaagagtccatctgcttacccttcaatttccactcgcaccggcagcacacctgcctcgacatctcgccgtacggcaacgagcaggtctcgcgcatcgcctgcacctcgtgcgaggacaaccgcatcctgcccaccgcctccgacgccatggtggccttcatcaatcagacgtccaacatcatgaaaaatagaaacttttattacgggttctgtaagagcagcgagctactcaagctctccaccaaccagccgcccatcttccaaatttattacctgctgcacgccgccaaccacgacatcgtgccctttatgcacgccgaggacggccggttgcacatgcacgtcatcttcgaaaaccccgacgtgcacatcccctgcgactgcatcacgcagatgctcacggcggcgcgcgaagactacagcgtcacgctcaacatcgtgcgcgaccacgtcgttatcagcgtgctgtgtcacgccgtctcggccagcagcgtcaagatcgacgtgactattttgcaacgcaagattgacgagatggacattcccaacgacgtgagcgagtcctttgagcgctacaaagagctcattcaggagctgtgtcagtccagcggcaacaacctatacgaggaggccacgtcgtcctacgcgatacggtctcccttaaccgcgtcgccgttgcacgtagtttccaccaacggctgcggcccctcctcctcgtcccagtccacgccgcctcatctccacccgccgtcgcaggcgacgcagccccaccactactctcaccaccagtctcagtctcagcagcatcatcaccgtccccagtcaccaccgccgccgctgtttctcaacagcattcgtgcgccttgacactgtacggcagaaaagccggctccaagtgcaagcgccgcggcagcaccatgtgcaaaaacttgtccttgcgcgcggtttcgccgccgggaaagacgggcgacagcacgttagttacagccttgagaacctgctcaaagtacttgtcggcgtgaatgggcacgccgtgctcgcgcacgtagctcggatcttcggctacctcgtagttgcacacggccgacggtggtttccgcgccctcttctttgccggctctcctcctctcctgttgctctcctctaccccgccgccgtcagcgtcgtcgtccgtgccatcaatcgcgtccgaccgggaaaccacgccggcggttacagaatcaccgttgtcggaggaaccctgcggcgccgtccggacaccgggcgccgtcagaacgtaaaagacccgatccccgaccgagggtagctcctcagaacgggccgccaatcgcttaatgacggcaatgtgcggcaggttagattgacggtacagcgagatgtccttagagagcaccgacgaaagcaccaggtcctcgacacgcacacggtgcaggtacagatcgtcgcgggcctgcaccaagcggcgtaagatacgccagaaaccgcgtggcacgccgtacttcttgacttcatcgagtgagaggcgcgacaggcgcacggctgcttccgagacctcgcgatcctcaaagagcagcgagaggacgtcacgcgtgacgcccttgacgaactcgcaggccgtcttgcgcaccagatccacgcccttcatgctcagacccgaggcgccctccactttgccgatgtaacgtttcttgcagatcatcataagagagacgaagaccttttcaaactccagcttgacgggctccacaaaaagacaggccgtcacgtagtgcgccaggctgggcccacgcgccaccagagcctgcggcgtcaggccacgaaagcggacaaacacgctgtccgtgtccccgtagatgacccgcgcctccacccgccgttcgttcgagccccctgacgatgtttcgagcccctccggtaacgcgctgctctcctccgaatccccctcccgcgttcccactacatagtcttcctgattaaaaaaattgtgcaaaaaacacggctctgaaaagttgtctttgatgaaccgcgccgtgcgctctagcatgtcgcgaccgatgcgcgtgatgctggcggcgatgggcagacacggcatcataccgttgaccacgccggtaaaaccgtagaaagcgttgcacgttactttgagcgccatctgttccttgtcgagcagcatacggcgcacagggtcttgacactcgcgcatgcattcgcgcacggcacgccgctgcgaaacccacttgttgagcagttccgagagcaccgagacgcgcaccgaagcacgcacaaagcggtgggtcacgccgttctctagcgtgacgctgtatacgtcggcggggtccacagggtactcgccacccggcaccagcagggtggagtagcagaggttgtgggccatgatgatggaagggtagaggctggcaaagtcgaacacggccacggggtcgttgtagtaacccacctcgggctcaaacaccgtggcgccctggtacgaaaccgccgcagtaccgccggcgccgtgattgtcgttggaaacgccgacgccgccactactgccggagccgacgctgaaaacgccgacgctgctactactgttactgccggagccgggtgaaacgccgtcctgactggacggcgcagattgcaagggcggcgacatctgaaacatagccgccacagaacccgcgtcgccgggcacagcggcggtagagatgatagcagcgttaggtgacacagcaacgctattcgtttcgggcaccgtcgtacctttgctgtagtggttgggcaggataaaatcgcggcaggcgcactcgtccagcagcgaggtgtagatacggatctgctgtccgtcaaagatgacacgccgcaacggaattttagccagccgcgcgatggccccggcctcgtagtgaaaattaatggtgttgaacagatcgcgcaccaatacggcgtcctgcagacagtaacggcctacctgggcgcggccctcggcattagccacgaaacaacgcgggatgtccttgtaagacaggtcatccttgcgttgccgcaggtaaagctcggccatagtgttgagcttatagttgggcgagttagtcttggccatgcatacagggtacatgtcgataaccaccgaacccgcaatatacaccttggtggcggccgtgctggccggattgttgtgagaagccgagggaaaagcggcggcgtactgccgcttaaaacccacggcggggctgtgtaaaaagaaacggccgccctgcgccgtaggcaacttgcagaagcgctgcgagtccaccttatacaggtactcgagacgcgtgaggatgtacttcaagtcaaaagagttgatgttgtaaccggtcacaaaggccggcgcgtaccgttgaaagaaaagcataaagcccagcagcagctcgtattcggaagggaactcgtagacgtccacgtctgggcccacctgcccgcaggtgccgatcgtaaagagatgaagacccgagtgcccaaagatcacaccctccgaagtgcagccccgaccatcgttcccgtttgggatcccctgatccacggcggtgtttccccccgtctcgtagcacacgcacgagatctgaatgacaatgtcatcggacttctcggcgcagggaaaaccaccctcgccgctcatgcactcgatatcgaaggacaggcatcgatagcgcggccacgagctgtcgtcgggcacagccaccaggtcagagacatcgcagtctacctcgatatcacaagtcgacgcgcgaccctgctgccgccagtcgtaacgattcacggagcaccagccgaacgtggtgatccgccgatcgatgaccaaacgcgtcagcggatccacacggacctcgtacacgggaaaaccctgctccagcagatactcgccgatttttctggccatggtccagttgctgatagacacacactgcaaatcgggcacgggtcgcgtcccgtacccatagatggaggtcttggtggccggcgtgacagacacggcgtatggcgtccgcggttcgggcactagttcgcccacgctggcaatgacctcacgcagcctatcggtgtcgctgtactcacagtaaaagtagctgcgctgcccgaaaacgttgacgcagatactgtagccgtgttctgtggccccgaagaaacgcaacacgttccccgaaggcaccagatgctgacgatagcgcggcgacacgttttcgggcgagtcgaagaagagcacggcgtccgtctgatcgtaggtgtgaaaacgaataggtcccaccacgcgacccaccagggtctcgcgccaaggacacggccaaaccatgtcatgactcaacaaatgtttaatctctcgatagaacatgagaggcagccgtcccgtcttatgcttgatcaaccccgtctgaccgtcgaacatgacacctcgcggcacgatctgcaaaaactgtttctgtggcggccgcttgcccgagccctgcgcggagccgggctgcgaacgctgacgccggccacccgcgaccgcaccgccggtcacgccgccgctcagatacgggttgaaaaacatagcggaccgtgagaggctgacagcttacgaagcaaaatcacaaagaaaatacacatgcagcacctagatatccagtttaaccccgtatatcacaagtctctgtgtcaatattttttgtctagtttttttttcctcctggttcagacgttctcttcttcgtcggagtctttcaagtgtctgtagccgtttttgcgatgtcgcagccggtctagcaggttaggcttctgtcccttgtcctgcgtgccagtctgtccgtccaaagaatctgtaccgttctgctgcgctcgctgctctgcgtccagacgggccagggccagaagcatctggtaagcctgctcgttggtgtaaggcggagccgccgtggatgcatcagacgacggtggtcccggtcctttgcgaccagaattataaacactttcctcgtaggaaggcggagcctgtaacgacgtgtctttggtgctgcccgacgtcacggtggtcccgtcggcggacaccagatagggaaagaggttctgcagcggctgcgtgcacagacgccgctgtcgagtatagatcaaataagtgataatgactacggctatggccacgaggatgatggtgaaggctccgaaggggtttttgaggaaggtggcaacgccttcgaccacggaggccaccgcgccacccacggccccaatggctacgccaacggcctttcccgcggcgcccaggccgctcatgaggtcgtccagacccttgaggtagggcggtagcgggtcgactaccttgtcctccacgtactttacccgctgcttgtacgagttgaattcgcgcatgatctcttcgaggtcaaaaacgttgctggaacgcagctctttctgcgagtaaagttccagtaccctgaagtcggtattttccagcgggtcgatatccagggcgatcatgctgtcgacggtggagatactgctgaggtcaatcatgcgtttgaagaggtagtccacgtactcgtaggccgagttcccggcgatgaagatcttgaggctgggaagctgacattcctcagtgcggtggttgcccaacaggatttcgttgtcctcgcccagttgaccgtactgcacgtacgagctgttggcgaaattaaagatgaccacgggtcgtgagtagcagcgtcctggcgattccttcacgttcatatcacgcagcaccttgacgctggtttggttgatggtcacgcagctggccaggcccaagacatcacccatgaaacgcgcggcaatcggtttgttgtaaatggccgagagaatggctgacgggttgatcttgctgagttccttgaagacctctagggtgcgccgttgatccacacaccaggcttctgcgatttgcgccagcgcccggttgatgtaaccgcgcaacgtgtcataggtgaactgcagctgggcgtagaccagattgtgcaccgattccatgctggacaaatgagttgtattattgtcactcgtacttcttctggtcctatgagtgatattcagactggatcgattggccaaacgttccaattccaccaaagatttttgcttgatgccttgccagaacaccaccagaccgccgctggtttcgaagacggacacgtttccgtatttttcatatgtttgattgtatgaagtattgaaaatctgctgtaacttatttatagcctcatcacgtacgcagtccagcgcggagtcggacatgttcacttcttgtttcttagacagaaaagttgcagtcattttggcagaagaaaagtggtacgagtcttcggcttcggaacggatagtacgttccgaggcttcccagaaggtgagctggcaggtgacattcttctcgtcctgtatatcccaagagatcaccgagtcggcacgttcgagaaaagccaccaacctatgggtttctggcgcagcgttgggtcttccaaagtcggaaacgatggtgtagttcgggaaaatgaaaaacttgtcggcgttttctccaaagtagctggcattgcgattggttccgttgtagaaaggagaaatgtaaaccacatcacccgtggaagttgcaaaaaaatgataaggatacttggagcgcgcagtagtgatggtcagcatacagttcagattacaggtctcacgatagagccaggtgctgccgcggctgtgccactgatccttgaccgtcacgtaacgggtactgtgggtgttggaataatcgtcgggaattaattgcatggttttgttttcataactgtccctatgatatgccacgaaaaccgtgcctcctataacgcggctgtaggaactgtagcattgagcaaacttgttgatgtgatgaatctcccacataggaggcgccacgtattccgtattgctgcccagcagataagtggtgtagatgtaagcgtagctacgacgaaacgtcaaaaccttttggtagacccgtaccttaaaggtgtgcgccacgatgttgcgcttgtagaccaccatgatgccctcatccaagtcttcattgataggcttcatcgaggtgcagatgatattacgttcaaagcgaataagatccgtaccctgggccatagaacacacgcgataggggtacttggtagtgttgactcccaccacatctccgtacttgagggtagtgttgtagatagtctcgttggctctatgactgacggcttcagaagacgttacgtgttgagaatagactgaccgggtttgagcagacgtcgtacgagaagtatggcttccattgtgagtagaagaagttgcatgggaagtactagaagaggaaaccgcagcacccagacagacgatacacaggttaacgcagactaccaggcaccagatcctggattccatgttcgtcgcgggccaaatccagcagcgatgaggcgcgtcgtggtctcttgcgtgtcgcgcggaccctccgggaaacacccgcagtcgaggaggagggatacggacttggcagccaaggtcggtccggctccctgaagacacccgagacggccgcggcggccgtcagggtggagggcttggccacgggagctgttggcacgtcgccactctcatccggtctggacagatgcctgtagaggaggagatatagatctttggacttataaagacttccttcgtgacgaagcagcagcggccactctttgttatacgtgagaatcacatctctgtccgggtgcagttcgtcgcgcaggcacgcgatcgagagttgtttcccgaaagtttcattatatagtgcgacggagagcacgagctcccgcacgtgcatccacatctccttctgcagcacgtttaggtcctgacagtccgaaaaattgaaaaaacccatatacttcaccaccatccactcactgggatacacggtaccttccgcgcatttgaccaaatcgtccttgacgtggggtagtacgcccgcgttgtcgcaggcataggccatgtccacattgtgagagaggggataacgatcggtgcagtgggtgaagaggggcccgttacacaactcgtagatctgctgacccagtagcgggagggattccacaggcagactcttgtggatcaggttattgaccacatacaggtgctcatcgtaggtgaactgatcacccacgtccaccacgtcttggtcctggtggtattggctgcggtacagaaacccattcatgagcttagagataaagtccagacacaagggccccactagattgacatcgatgagcttgctagtcagacgctcctgcgttttgatgcaacggatcaccttgccatagcccacctccgagaccttctgcaggtaggcgcgtttgcgcacgttcacctcgcgagtgacgttgtggatgcgggagcgcgcgtccaccaagtcgagagcctcgtgttcgtcgcagttgcgcacccgtaagccgttctcgctgccgtcgccgtcctgcccattcacccctccccctaccactttcttgcctcctccacgagcccggccgccgccaccgttattcctctgactgtgagtactgctgttgctgctgttgctggccgtcatcaaagtcgtacccgtccccgacatcgcctcccgtccacgcaggtgaatagcctcgccctcggggccgtcgccccccgtgccatctggcagcggacgtcgaatctcctcgagaatatgcttgattttggtgtacatctcgttgctttcgtggagcttgttgaacaccgggttgtcctcgaaagcttgaatgctgagggatgtgatgaggtcgatgatcctgttgggggcggcaaagaccgaccccacgaacatgcgctcctccccgtccaacgccttttccccgagcacgaagatgtcctccacgtcctccccgtacagatggcgactgatgccgttcatgagcgcccggcacagctggtgatacacatttagctgctggatggtgatgcccacccgcttgacgataacctccgaggtacgggaccagtaggtaaaatccgacaaggaatatattcgttccggtatatccgtaaacaggttgtactccctcagcgcctcctccgcctcctggatgtagctgtggtaggccgatgaagaagagaataggcttttgagggccgaaaggactccagccaagtgggggatgcgcgttgtcaggtccagcaggtcctgctccaccgtctggatattcacatcggactggcttgacggacggtggaccgctatatggttgcacagcaagccctgcagccgcttgttcagcgagcggccctgattcgggatgatggtcagctcctcgtagcattgggcgcatgtcgtcccttcgacgtacacttcctgacgcgccaccggcgagatgccgcataggcgacggaggagctccagcaactgcgcgcagacctccaggccggcctccggcgccaggatcccgtacacgtagttcattttgcacaggaagcgctcgatgtcgttgagtgtggccagactgacgctgaaacggacgttgtccgtaaactggagctccacggtgtgatggcgatcgcagcgatccaaacggaggacggtacggtagaaggccgcccggtccggctggcgcgagtaggccatcagcgcccgatccagcaaagccgtatcctcgtgcagcgccttcagcagcatctccaggtagagcgtcagcaacgaactctgcgtacgattctgcgccaccacctccgggtagatcttccggtacagatacactatagccgccgcgtttctcttgaacggcgtggactccgccagtaacacgttcggatcgcagtactttagacactccagctccatggcgtattcgttgcatttcgaacacactacgcatagtttctgtaacaaattcatctccatgactcgactcgctcacgtacgagacgctgtcgtccggtctggcgccggccagagacatggagtcggtgcacaaataactcgcgggccgctcgctatgccgactgacgttgacgttaatatataacgacgtcgtcgacgacgcgggttctgctcccgaagctgttgccgccgcttgcggcgcaacctcctccaccaccgccgccgccggctcctccgcctcgggcgacgggggctcggagatgaccggctgtgtctgacactcctccccttcctcaggcggcccgggcgccgacgcgaatgtcggagtttgccagcgcggcggcggtctctgtctctggtgccgcggcgctaaccttcggggctgttgctgctgttgatgatgcgacgccgtctgtcgccgctgttgcggcggtagctgatacggtgtcgcctggtgctgctgtgtcggtggctgctgttgctgctgttgttgcggtctgaaaagcggccacgggggctgcgactgttgttgctgttgttgcgatgctcgtggctgcggcggccgttgtcgcggcgtttgctggcggttacaaccggctgcgtttggccggcaataacccgctgcccccgccgcccccgctgctcccgccgacgccgccagcctcgtcttcgccggcgttcacgagaaagcagccacctcccgtctcgccgggcacgccgaagcaaatggagttgcccgcgacggactcgccgagaagaagaccgccacccccgacgccggacgccgcgccgacgccactgggcgcgaagagcgccgacaggtcgtgcacctcccccccggcggcgtccgttaatcgctgggcgtcggcgtccagcacgcgtcgcaagttctccagcgaaaagtcctccacgccctgctcctgcaacgcggcaaacttgtccatcagcgacgcggccagcgcctcgcagccatccacgaagaagagcacatcgtcggacgcggggatctcctcgcgcacgctcagaatctcgtacacggccatcacttcggggtcgcaatccaagttctcggcgtccagcgccagcatgacgcggttttttataagatccgcgtcaaaaagcacgttctcgcggcgcgagcgtttgatgagcacgtcggccagacgcgtagccaagaggtagcgctggcgcatgaaacgataatcttggccgctcatagagctcacgttaaggctgcgttccacaccgttgcccgaaaagtagccgatctgcccaaactgatagatctccttgctgttgttgatacccgcatatttttccacgctcacgggcacggtcaccaaggaacgatgctcaaaaacgctccgtaccaacgattcacgcgccacagtggcggccatgggcgccggcacgcctgcggtcttcaagcccttgacatgcaacgcaaattcggcgggcgacgagaaccgcggactagcacctaacacgtgaggaaactgcgcgtggttctgcgtcgttaagcgcgtcgtcaacccgtgcagcgagccgatgtagtctttgaagccataatagcagaggaatttgttatggaaacggctttccacgtaactcagcacacagtctggcgccacatccagcagatcgtgctcctgatagtcagccgtcacagccaccagaaatttgacgaaagcattgaactcgcccatgtcacctatgggcacattcttgggcaacgcgttggaacagaccttctgccaaaactgtaagcaggggagaccacattcaggaaagagtcgctcgtgatgtcgatacagcagaaatcccaagcagcccttagccggattacgacgcggaacgtgatcgcggcgaaaaaacacgctacccgcgttgcccttgcccgcgcggtagatgggtcggtttttcacccgcaccatgatcaacgtgggtaccgacagccgcgagagcttgatctccatgggcaccacggcgtacgtgccctgcgcgtacagcctaaagtccagcaggcggtcgtgatccgaattcttggacgacttgatctgcttggtgaagagaaagcccttgcgcgacgacgtggtggagaacgcgccgtgaatggattgaaaatgctgcgtcatccatttggataccaagttggtggtcaacggattgtccacaatgtatgaggtagcggtaataagcgccacgttctggatcacgtaaaagacggatctgaaataggcgtaggctagcagcggctggaaggccacggcgtagggattcagatccaggttgaaggcctgcgtggcgcccgccacctcgtcgcggctgctcttgaggcgcacctccgaaacgaaacccagggcctcgtcgtccacaaacttgttgagcgccgaaaagacggccacaaagtcgcttttgccgtgcgcgctaaaggtatcctcgcccgtcacggggtcgatgagccgcatcttgcggcagtaatccaagatgcgattgagccgataggtacggtccacgctagcgcccaacatgcgaccgccgcgccccatcattcccccggaatccccaccacccccaccaccacgaccgccacccagaccgtcgctcgggcccccgctcacgtctcgtccaccacccccgccagcaccgccgcccggaaccccgtcgtcacctttgccgtccaaacccccgtccttggcgtcgacgttgtaacgccgaccgaagctgcccaaaatatccacgtcgttgagaaaacgcgactgcacggtgatcacgcagggctccttcttgggctgcttgggcaccacgggcaagcgggtgcgcacccgcacgaaggccgtctgataacacgtgtggcaacaagtacccccacaggcctcgcacagccccgcggcgcagcccaccaggtgattcgtgagcgtcgacgaacccgacaagcccgtgttgtacaccgagacacgattcagataccagacgaagcccgaaactagctgcggacacgtgccacacaccaacgccaaatgctgcggcccatagcgttcgtccttgagcggcgcgccctgaaacttgagcaccttgcgcgcgtcgttgtagacgtcttcgcaggccgccgacaacccgttggtgaactgaatagccttgagcaacgtctcctgactggccgtaccgccggcgctgggatgccgcgccgacgactggagatacaccagcctgtgctggtagagcaccgaattagcgctgaagaccaaggcggccacgtgcgtcgagagatgcaacttgagctcggtcagcgcgcggatcagatcgcggtgatcggttgcgttggtcactaaaggccactcggaaaagagcatagattcggcaggttggtaagccgaatcgaaaaataccgaggcaaaactgaaggccaactcgcaaaccaccgcgtcactcagcatcagatgatccttttccagactgctgagtcgctggctcatgtaccccaagtagcgcttatgtggcgccagcttcaccgactgctgactgtcgtgcacaaactgccgcaacgccgcctcgatcagcacacgcggctccgagaagcgcagcgattgacaccatgacgtgtacacgtagtagaaaagcgtctcgcttacggccggcacgtagagccctcgcgcctccacaaaagcgctgcgcgcatccagcgagacctcgtcggcttcggcgtcaagctgcaacgaattaaagagcgtaggcgggtacaacggcacgcgcaccgcctcgccgccgtgcagtcgcaccgtggtcgcctcctccacgcatggaatcagctgaccggcaaagagaaactccttcaagccgttgcccaccaccacgtgcacagtcgtctcggacgcctgacagcccaccgccgcgcacaacgccgccagatcggtaggcacgcgatccgcctcgggcatgtaagcctccaacgcgtacttctggcgggcgtcctcgcacagccgatgcacgtctccgtgatcctcggtaaaagccacgatgccttgcgtatgatgaaagtagagcgcaaaaggacagaaggacgtgactttcgtgagcaccccgccgtcgtaacaaagcacaggcgtgcgcacagagacgccgaaatccgcctccaccgtgagccccgccaacaaaggagcgatcaccacgctcgaggaacggtcgcatagcgagagagtggccagaatctcctgcgtttctgcgttcaacctgctgaagtagagaaaagccgcgggccccaccggcgctagcgcggttagttcctcgtggctcatggtggatgaacggaagacaatggctacgccgccactgagtgaattttataccaaggaaaagttcagcacgtcatgtttgacgcacgacgtctgagacaccaccgtggccaccactgcggtctggctgcggttgcggaccaccaaaggcgacaaccgcaacgatcccagcaattcgtaagaaaagctaaccgctacggtcaggtagcctctcgcagccagaccgctagccgacgcacccgcccgcgaaaatagcgtgatgttcgggacggctttgcgtcaccgccaactaacgtcggtagtcgagcacgtcgtttatcctcagcacaccgtccgatcacaatccgttttcccactcagtcgcacaagcagcacataaaaaccccacacagggcacgtgaaaacaccgtccctagaaaacggcgttttctgtcctaccgtcacccgtatacacaggcaaatcccaatcccgatccccgaaaacaccgtacggtgtttgtgacctccaaaatcacatcagctaacaaaccgtgaaaagtcacgtttcacgaacacggtgtttttaaatcacaaagaaccgcctgacggtttacaagcagaaacaccgcaccacggtggtacaagcgcgatgaatctggtctcgcaacctcaatcgccgctatcaccaccgattttcgctgcgctccgccgacaaaacgccgtacaagctacacaccccaaaaacccgcgcgcctacgggcgccaaacctgtgtgttatctcaacgtcacaacacgacacaaaccgcgtaacgtggtttcccgaacacgtacgcggcacagacccccgacacgtactcgaagaccttacagtttacgagtcaataaaacaggaaaagatccgaactttaaaattgtgtgtttttattttcccatccccctctttttaccaaaaaacacatttttcgtcttgtaaaaagtaactttcgcccattgccatgaaacaccgtgatggggaacggtgttgtgtgtcgactgacgtcactacggcgatcagtatcgacgtcgtgtatacataacggtgcccggtgtttttattcggggcgttgtcgcgtcttgatgtaatgtaacctgaaaccgccgtgcccaagaatgcggaagccagcgtgtaatcataacggggttttgggtacaatctgacgacatctggcggcgagcgtacaccatcgaatgtggcgatcgccggctctacgtcacaatgacgcaaaaacacactgtaaaacccgcgtagacagctttcctggtcaacgagcgccatctggtgtcggcataagaacaggcatcaaccccgtggccggcgaggcggtgagcacttttgttggtcacgtgaccatcagcgcaggaagcgaggcccgtagaaccgcccaagaggcggtgccagatgccaacgtcataatcacaaggtgatttgttacgtcacgcgcgcgcacgcacgcgcgcggtagaatacagcgatccctagtgaagccacacccattacgtgtagccatatccgcttacgtatacagccacacccctaggtacgccaccttatctaccaatcacagaaacggatatacaatgacccctccctagactccaccccttgtacggaaatttcagataggtggaacccgttagggttccaccgtcctcggtgtacgtacaggcttctccgtctaccggaaatatacacctgctgacgtagacgctactcccggatacgcgtcataagctactggaccctaggggggagtgtctacagggctacgtgcacgcccccttacctagggtatccgcccccttcctctgttttggcctagtaaacttaacgccgccgcttctcacgtgacccctgacaagcctacgtcacactcgcgtgaccacacccactccggatatacgtcatcctgtggaattccggacatacggtgacgtagcgagcgtagcgagctacgtcacgtatgcgtgcgtcatctccggcggaaatcatctctgatgacgtagcgagcgaagcgagctacgtcatcagtccgttttacgtataccggatgctaggcgacgccccgtaggggcggagcctagcttccacccctaggatgcataccctatatagcataattcttctaacgaaacgttctacgaaaacggactggcggaacgggaaccaccgtaacccccccccctcacccccccccttctcctccggaaccggggggggcaaatttttaccaaatttgggcaaccatgatttccaatgggacggcgtttccgtgcgcatgcgcagtcggggcgagtttttggttgtcagggcgttgccacgcggattatgggatggtgactcgagtgcgcatgcgccggggatgccgcatggaaaacctatatataaggaggggtgaaccaggggccccggggcgcatgcgcgggccagggcccgcgggagggtcgccctgcgcatgcgccggtaaaattccactgtgtgtgtcgtgcgcatgcgccagtatttttccactagaggcggtcagtgcgcatgcgtcggtaaaattccactagatgtgcgccgtgcgcatgcgccggtatttttccactgggcggccgcacctagggagcgcgagccccgtgccgggcatgggccgcggcggtggaaaattaccgctccgcccacctaggcggggcatctgaaaacctataaaacccggcgtgcccgccgccccccggcgcagtccgcggcagggttccggccgtgctgcggtccgcacgctgcgcccgctcccgcctgcctcccgccctaccccccaccctccccggccgaggcccggcgccggtccgtccgcgggcccgtcccaccgccctggagcaccatccggggccgtgggccgggcaccgggcgcggcccgctccggacctcggccgggggtccctcccctccccccgctcgacccccccatccgacggcccggccgggctgggacccccgcaccggggtcccggttcccgtccgtggcccggggggacccgagcgggggcttcccacccccaccccgctcctccccgggctccggcccgggatccctcgctgctcccggcgacctccgccggcttcccggtccacccgccgcggaatggacgggacccggggtccgcgcccttcccctccccccacggggggctgggtcgcggaccccggttcctaggctcgttccgcggtgggcgaccggggatcccccacccagctccccttcccggcccgccttgctggcttttgggcccctgcgggctttttttttccggctgggggtcgcggcggtcggccgacgacgacggtaggtgggccgggtggacggtggtggggacgggcgacgccccggctcgacggcaatcggtcccggaaggttgggggctgggggcccggtcaggagctccgggagcggggtcgaccgcgacggcttccgggtctcgcggcggctccctctcggcggctccggttgggctcccctcccccctctcgagggtccggccgccagtcgtgaccgggggtccctcggcctagccgccggctctcggtccgccttatcctgggcgttggcctgtcccgtgacgctcccctcccccgctgctccccaaaaaaactccgcccgaaccgtcgcggcttgctggccctgggcgtggtcccccactcccctccccccatcggccgcccagccggggtcggcgcctcggaccccaccaggctgtggcgtgtgtgctggccgatgcggcggcgaggttgggtgtggccggaagcgctcggggtcgacggtgggccgccatgacacctcaattgtcgtcagtacgcccctccacaatcaccgtccccacacgatgggcccggcaggtcacccaacgttggttcaggcccagtcgggttttttccccggcacgaacgcacgtccccgtgggctccacgcgttttccaccctttcctggaggggtccggaacaccgtgaatccacggggagggtcccggcacgggccgaggagaccacgaccgtcccacccggcgtgtcgactcgtccgagacccgggaagggaacaggccccacctttttttcccttctccgattttgccgtggaaaacccgtgaaccgatacgggtgcagacggccgaaaaaaatcgagacgacaatatgacggcagggcgcgatcttctcccccatccgacaaaaccgtgtcccttaaaattccccacctttctctgttcaaatggccccgaaactgtaaaacaccgtttgaccgcaccccaaccggcgccatcttggtgaccttctcgacggttctctcgctcgtcatgccgttctgagctccgacatggcggacgagagaaaatggcgtcgagagcctaggagcgtttttgctccaggcgggtaaaaaaatagcacgataacttttctgtgcttttttttgagacgttttagaagagcttttttctgctcagagcgaaaaaatgatagccctgaaaatctcgacgagtctggccgagcggcgccatcttggaggaggggcgagtcgcgggcaccgcctcggtaccccctggccgaggcgagtccgcggtcgccgcctgttccgtgatgctacctagagggcgctgtcgaggcgactcttcctgttttcgccctgagggctaacggtcgctgacgtcaaaccatctcgtgctcgctgagtcacatccggttgttgacaagcgatggaggaccgcacccaaagtgcgccctctagtcatcgcgcctgaccccttttataaactgctcgaagaaaagaacaccttatgtgaaaaaatacagaatgatgacaagttcatccaacacaaccgctcaacaacgccatatctatcagtgtccaaaaactatcttctatcctttgaaactataaatgctgcctatatacatatttagtatccaagactcttaccacgtagacgaaaagaagtgatacaatgatcttgacgtgtatcgtctatatcgtgctagatatattcagataagacgcgcaaaccatagatttctcatcagtatcatgaaagacctatagctctatatacgaacctagtcattttaggacagccgccggagaagccgacgagggatcgggcgggtgcagccagaacctcacgcccgatcccgcctccggtaggcgatttgcatctgtttggtaaaaagctcataagtctgtatgtgacctatatatattatacgctatgtacaccgaactgtcgctgttgtataagaagaaaaaactctccatatttatatcgtctgaatttttgcttgatagacacgtgtttggaactctgtccccccacgttttcactgtgtataacaaaaatatgtgtttctcaaaagatcttgaggtgtttgaaaacgggggaaacctgcgtttgggtgctctaagccccggactgggacgtagccggcgtccggcacctatatttttctatttttttttacaaaatatatgatgaaccaagaataaaactctagctctcgtctatttttaatatgctctacttagaacctttttaatgacagaatgaactccatgttatacgctctttatatagtttctctgcactaacctttaaaaccgtatccttccctgttgtacaaatcatcttttgatacacaatgatgacctgatatccctccatatatatgatcggatattattccgttagacttgtcctccttttttttcctcatctcctgtatctggagatatatgttgaccaccaccgccatgaccaccaaaaagctagccgtcacgactagaaatgtgtaggattcggactttccgttcgagaagaaaaagagaccgcgtctctggacgctctttttgtcagtctgaatcgacccgggatacgtaagagagcggccctacatcggggggcgctcgagaccgacgacgttccatctgaccagaaaaaaaaaggcacccctcggtggcgacctctcaccatcgtttgcccgtccgcccgtccttcgtagccatcatcatctcaggctctatcggtaccatcgttgtcatctgaaaaaaaaactgcctcacccacctgcgtaaaaacaccatctttccggaggtgcggtaagacgggcaaatacggtcgtgccgaggcaaaaaaaacgcaccatcgacaccacaccctcatgagcaccacctgtcggtgttggtcgtcctccatcgttctctacgaacatctcgacgcccgggtgacggacgacggcaagacgtcccggagaagacggtgttctctcgggcggtacgctctctggatctataatatctatagtagctaaacgagactgtgagtacgacgaaccacatcatcttttttttatgttgcttctttagaaaatgacttatgtcgacgacactcggcatcagccatctcgtgaaacacgctcgcttttcgtctctccaaggaacactgggtccgctgaaagggaccgtgtaccgaccaaagcaaaaaacacacacgtagtaacatgatcaaccacgtctgaatgacacgaaaacacaatcgtataacgctctattcatggaacgaacttggaataaaaaaaccatcgcaggccagaggctaagccgaaaccgtccggggaagcgggcgcgagttttccgacttagcctttggtgctcgttgagcctcttttttttttctgattctctgaagaatcaccgtcacagccctatgacgcgaaatcaattgctagaacataaacgttctcaacaggtatgaaatgaacaaactagatgatgctataaccttatattgtgtgtatatagataggtgtgaaatttgtaggataaaaagtgtcgttgtatgatgcacaacgatcgtgaaactggagactgtagctctctaccgaatgcaaatacacaaatgacatcgattcccgtccccacataaagaaatgtgctttactgtgaaagaatgaagaagattcttgttcctcgtacgacggggccctcgctcgtcgtgcctcttcccccctccgggagaggggacgtcggggccctccgtcgcaccgggccgaagccagtgaaatgtttactacactgtcatcagaatatatgatgtatattatttcctccaaactcctcaccatagccaccaattcgcatcacttaagaaagtagtagcaaccgcggcggcggcgaccggccggtcgtcgtctcctcgtcctcaaatgttgtacatgtgcagaaaaatgtgtaaatacgtgttatttatcccatgcgtcttgtacatagatatatgtttttatatacgctatttatactttatatatccttttgcataaccatagacagtcaaggattttaatgatttgctcatccgcctttgagccatcgcttaggagttagttcctctatgttctcggcccaccttttcgactacagtagcaaacccttgtactaccaccccgataaaaaccacatcatcatcgtcaccacgacctggaaacgacacacgttcccccccaatcttgggcatgtgtatatataaaaagaatgggagggagaggacgtggggctcgagaagaaataaacgccaagctcgattcgaaccaaaaaaccacatgtgtattgtgctttgtttttttttttacggtgggggaaaaggagggggccgtcattaacggaaaccgtgtatggggtccggacacgaacagtacacagcttatggggaaaaaagctcacagagagaaaaaacaccaagctcaggcacgcgtacatcattattatcatcatcggatatctcaccacgggtcatagtagtaccaaggagtgtgtaacaccattttttcttttctttgtaacgggataagggacagcaatcatcacgcacaacacccttcactctctttttagtcatccatatcatcgctgtaacacagcatgtcctcgtaatcgggcgtctggcagcgcattaccaccgagtcgtcttcttgcggtaccggtggtggtggtggtggcggcggcggctgctgctgctgggttgccgtcgtactgtgattaccgttggcggactgcaccgggatgatgggctgcttgtggggaacctggggtggactgccgccgtgagaaggcgacggcgtcatcaagttaagctcaccacggtgactccggacaccggcgaggggcgccgggggactgggagggaccgcggtcgtcttgtagacgacggtgtccccgtgtcgatccgtggctcgtaccagatcttgactgctagcgtcgtcactgtcttcgtcctcttccagctcgccctcagagtagtgctgctgtggttgcgacggtggctgggcgggaggagcggcggcgatcattggagagggatgtcgatgactcccttctctgtcctttttatcgtaggctgtcagcgttgctgggtccgtcctgctttccatatttgcgtattgctcatcggtgggatgaatttggtctcctccccgctgttgtccgccggcagtggcgtggttgctggcggttgtcgttgtcgtaccggcaaagacggtgagatccaatagcgactgctcgtcgaagggacagtacgctatcatgaaacgatagggtgccaacgcgcgttggatgcgcagttcgcacatctcgttctgacactcgtggcactgcagggcgcctaggatcaggtccgagacagcgccgcagcggtaggtacccatggcgttgttagtatcgaactggtcaaaaaattggggcgtaccggtgacttgcaacgcgcgacggcgtagcgagacggccacgcgcgagaaagagcacacataggccatggcgcggtgcatgggttgcgagaaggtctcgggcggacgcttctgcagatcgcagacgtcgtcgcgtagccaggcgctcatttgaccgggcttcttgactagccgtttgagcgtgctgcaatggtcgccccagccgtcctggtggtccaggatgcagcccaggtccaggttgttgagtttgttgaagagtagctgacgcatgccgcccaccgtctccagatagggatcgtgcgggttgacgggtagcccgtgcaggtggtggtacttcatgtagctgagcgtttcgtcgatgatggccagcaacgtgtgcaagttgggagcgttgtacacggcgaagatcttttccaccaccagcttgcgcagcaacggttcctccagccaatcgaactgttgacgaatgtgcaacaggtagtcggtgtgcatgagctcgtcgtgtgacagcaggatgcgaccgcgcggctgatgatcttgcgggaaggcggtggggaccttgagatcggcggggtagggtgccagacgtagactctcggccgtgtagcgctgaaggtcgtaaacgggcgaggtagaactcggtgaggtacccgacgaggcggcgccgcgctgcagacgcgctctttttttcttttcgatcaaacggctgagttgctgtagttcgtcctcgtccatggcgtccagttcgtcgtcaataagcgccagcatctgttgttgttgcggtccggcggacgatccgtgatgattattggctgaggaggggtgagaagaaccgaaagtcgtaggacaactgggaactcggcgacgaagatgcgtcgaatcgccgccgtgatggtgcggttcgccgtcatcgttgtcgtaagacttaccgtagtgggggttaaggggcaccgaggcggacgcggccacgcgtcgcttgaaagaggaggacgccctatgtccgccacggaagcccgcggtgcccatgatgatgtgtccgccggtgcccccgagtgcgtggcgggaggagggtggaaggggaggaggatagtggtccggatcgccttcggtatcatcgtctttgctgtagcggggtcgtcgtgcggggacgcagggtcggtgatgatgcgaggcggcgccgacggtatcttccgcgagatggtgttcgctggcggctgctccgttccgtgtcgacggcgaggttggacttcgctcgcgtcggaacttccgtggcacgggttcgtaatccagacagaagcgccgtgcgcgacgggcgcggcgttcgcgctcgctcagggaagataacgacggagcgtcgtgacggccgcgtgagtgcagctccatggccgccgtcgctaggaaggtcacgttcgggcacgctgatgtatatatagatgagaccgctgccggggggcgggtcaccggcgccgtggaaagtgaggctcagacggcggtcgccggcggcacgggcgcgtcgggcggtctgattttgatggaaatgtggacgtttttggcgttggagtgacactttttggtgaaacagcggctccagaggctggcccagagcgcgtagctgtgctcggtgcgcaggtcgatgaacacctgcacggtctcttgcgggttgcggtgcgtgtagttgagacagcgaaaatcccgcgtgcgcgcgccgtcgcgccgcttgacggccacgcagcaggcgccgtggggctgaaagaggaggacgtggggcgcggtaaactgctcgctgacgtgcggttcgtagtgttgcgtgaggtgctcgagcagcggcggccacacgcgggtgacgacgagccgctgcaagtccgtgtcggaaatcgcagcggcagtggcgccgtcgccaccgtacaggtgataggcgagcacctcggtgagaccgcggcgtcgataacgcgtcacgttaagcgagcgcgtctcgataaagttggcttcggtcgaggggcagattttgtcgcgtacgctgagaatgacgcgtggcggcggcgacaggggcaacgcgggcaggtcgtgcggcgggtggtggtgaagcaggttacgcagatccagttgggcgcgcacaaagcctagcgggtgttcgcggtaggcgtcgggcacgatgaacagcggcaacagacggcgatgcatgaaatagccgtcgtcttggtccattttatacatgtagggcagacgtacagagcgtccatggtggtagatgcctgtgtctaggctgctctcgggatgcgagatggggtccagcagcgtgtgcagttcggcgtcgagacagacggcgtgattgagcacctgcgccacggcgcgtaaaacgctggggtgtacggcgacggtgcaggcggggaacggcgtgatgatgcgcagccccagtttgcccttgcagcggcagtaagggggtgacgtgtcaacggaggacgttgttttttggaaaacgccgttatccgggacgttatttttatcctctttcccgtcttcgtcttcctctgtgtcgcgctcgtcccggtaatcgagatagtcgtcgtcatcgaaaggcgcgccggccgcgtccacgggcacgctgttgggtgggcacgcgcttttgaagaaatagaccgggtgccggtcggggtgcgtgtagccaaagaggctcgcccatacggtcatccagacgcgtcgtagtccgcgacatagctcaaagacggtgtgtcgcgccagaccggagacgccgtcgcgcagccgtaaatcaaagtcggccacaaaattgaagacgggcagacgttcgttgaagacttcgtgtcgcgtgtagtagaactgtgtctcggggctggtgctggccacgtcgtcgtcgtgtagccacacggtctcggtcagggcctcgtccgagaaacggctgtcgggtacgtgacggagcaggtcacgcggaaagaggctgcgatgccaggtttcggaggccacggcgcagaagacgtgctggtcattgggcaggtgtacgcggtagacgggcagcggtcgctccagcagcggtgccagcgcgggctcgggtagcaggtagcgacgttgcgagtaacgcgttagcgtgccggtggtgtaagtctgggctgtgcgtagcgaggcgcatagacgtaacaagccggacagggagcgttccagcggggagaagacagactcggaaagcgtgttgatgcgttcgagctggcgcgccagctgcgtggaggtgccgaagaagcccgccaggtgcgtgccgtcgatgcggccgccgtagccggccagccccaagccgtgcgggctggtcgccgagtggggggattcgtcgagacgcagtaggtgcgtctccacgtagtcgtgtagaaagttgtcgagcgagaagtatttttgcatgacgtccagcagctcggtggaaagccggcggcccagaaaacccggttcgcgcgtgcactgcgcttcgggcgccgcgtcagcgtcgtaagccaccacgcgccggtactcgagcaaccgcgcgcgtgccagcgccgtgcggtaggccaggtagacgtagtgcacgcagaccgtgtcgggcagacgcgcacgttcgcggaacgcgttgatctgcgtgtccacctgctctagctcggtgtagtcgcggcggttgcgcgcgacggcgtacgccacgaaagcggacacgcgctgacggaagggcgagcccagtagcagacgcgcgaactcgcccatggaggcgtgcgtggggatgatggtgcccaggtcgcgcgtgcagaagctgcgcacgtactcctccacggtggagatggtgctgtactggccctcgaataggtagtaggccatggtcagcagcacctggccctcggtgtgcccgaagacgctgatgaaccacgagggcgaggtggggcagaggaagacctggttgagatgacgtagcacggccgcgtggtgaaagtacaccaggtgcttgaattcgcgcacctcgccgccgtgttcgggcgagagcacgggcgtgcggaaaagatgccggtagagcggttgcgtctcggcctcgtccagactggcgatgagcgccgagagggggatgggctggcgcgcggccaggtagcgcgagagctgcagcgtttcgttgttcacggcgaagacgggcgccacccgccgcgagtccgagcacttttgcgtctgtaggcagaagtaaacacgtcgcgagacctggtgtttgaccagcagggggaagacgcagtggtccgtcggtgtctgcgagagtacgttggcgactatatgagcagaatcatactctgttgcgaacagaacgagcgtcatcgtcgcgccggcacgatgcagctggcccagcgcctgtgcgagctgctgatgtgccgtcgcaaagccgcgcctgtggccgattacgtgctgctgcagcctagcgaggacgtggagctgcgcgagctgcaggcgtttctggacgagaactttaagcagctggagatcaccccggccgacctgcgaaccttttctcgcgacacggacgtggtgaaccacctgctgaagctgctgccgctctataggcaatgccagagcaagtgcgcgttcctcaagggctatctctcggagggctgtttgcctcacacgcggccggcggccgaggtggagtgcaagaaatcgcagcgtatcctagaggccctggacattctcatcctcaaactggtggtgggcgagtttgccatgtccgaggccgacagcctggagatgttgctggacaagttctccacggatcaggcctcgctggtggaggtgcagcgcgttatgggcctggtggacatggactgcgagaaaagcgcgtacatgctcgaggccggcgcggctgcgacggttgcgccactgacgccaccggcggtcgttcagggggaaagcggcgtccgcgaggacggggaaacggttgccgccgtgtcggcctttgcctgtccctcggtttcggactcgctgatccccgaggaaacgggggtcacgcgtcctatgatgagtttggctcacattaacaccgtctcctgtcctaccgttatgaggttcgaccagcggctgctggaagagggcgacgaggaggatgaagtgaccgtgatgtcgccgtcacccgagcccgtgcaacagcagccgccggtcgagcccgtgcagcagcagccccagggacgcgggtctcaccgtcggcgctacaaggagtcggcgccgcaagagacgctgcctacgaatcacgaacgcgagattttggatctcatgcgacacagccccgacgtgcctcgggaggcggtgatgtcaccgaccatggtcaccatacctcctccccagataccctttgtgggttccgcgcgtgaactcaggggcgtgaagaaaaagaaacccacggcggcggccttgctgtcctccgcgtgaacagcctggcacgttttggaaaacgtacgtgatcacggacacgacgagtacggggtttctcatagacgtactttattaggtcagggatgacggggaggtttcgggccgacgtcaaaaataacgtcattcgtgttgacagggctttctgcgtcggagctcttttcatcttcttctgtctcgtcgacgtcatcgtctaccggcgagggtgtccgttgcagcaacgcgtgctcgggcgtgtgggtgaaaccgatgtcgggggtgggcggcacgatcatctgtcctagggggtgactgcccaccggcagataggtaaagcggtgggtggtaaaaaccgctttggctacggtggtgtgtggggagatgcagacggtggtgtgcgaagtgttgaccaccgtcacgccggccgcggtacccgggagccagatggtgggtcggatgatgagatccgattgactaaactggcgcacgcccactatgagggcgcagataccgggcgcgtgcacgtaggccgcgtcaaaatagacggtttgcgtgtgacccggaccgatcaccagcgtctgacgggtacgtaacgaaaagaaacggtgttcgttgggcggcggcaagttcatgagctgccagggttctggtacaaaacaggggaaaacgccgatatcgccttcgatggtgcccggaaagatggactgaaaagtgtcgttgaggttgacgacatccaactgcgggacttgcagcctggattccagcagctcgggcatgcaaacgaattgcgcgtccaggcatttgtaaaaggtaatgccgaaaaaaccttcggggatatagaggctgacgcccagcgaggtgggcactttgcgctcgcgtgatagccaaatgatgtgtttattgtaaaaggccagctgcgtgtggcattgtttgacgatgaaactggaaggcatccacttgtaaggaactttgagcggtgacggtaatggcgacgacgcttcatcctctcccggatgctgctctttgtcgtatttctcctcggtcgattggggcagcgtaaatgtggtttgaaaatcgctatcgctagcgaaacgcacgcagtaacgcatgttgacggatttctcggctaggatgatggagcctgatgacgatgcggactcttccttcattattaacgtaggggtctcccagaatcgctgaaaacgggagcgcggcagccgcgacagtaccagttgagagtcgattcggtcggtcaacatcgtaagcatcgtggcggtggtgtgatggagtggaacacactagtattaggtcttttagttttatcggtagtggcagagagttctggtaacaattcatccacgtcaacctctgcaactacatcaaagtcttctgctagcgtatcaactaccaaactaacaacagttgcaacaacttctgcaacaactacgacgactacgaccttatcgacaactagcactaaactcagttctaccacccacgatcctaatgtgatgagacgacatgcgaacgatgatttttacaaggcgcattgcacatcgcatatgtatgagctctcactgtccagctttgcggcctggtggactatgcttaatgctctaattctcatgggagctttttgtattgtactacgacattgctgcttccagaactttactgcaaccaccaccaaaggctattgagggtggacagatttacagcccggcggtgttccggcggggtaaggtttacatacgtgggtgaccggaggctaaagttacgaatctcatctagaaacagcagcgagtctagatagtcccacaggggatctataaatgttctctgaaaccccattgatggtgacgtaggtgtagttttgttactatcggaagctgttttgttttccacgaacatggtttcgttgtaatataaggagctcatgtcgagagtaccgtaaatagtgtacggcgtttcgttacggattagtacgtgcgtgtttttcataaattctgacacggcggttcggttgcggcttggttcacaaaaaggattttgccggtaacgtagagtggtatacacccacgttgctaggtcccttaactgtgtggccataatggacttcataaagctgctatcaggacgataagcaattgtagacgtggaaacccgccttgcggcggtagtaatactataagtcacgttagtagtgacgttgagagcggcagacgttgtataggaaaagtatggcgtagtagtactctgagttttcttagcttttttttcgaattgttccttaacgggcgcttgtttacgttttagttttcgcatagtgttttttaacttggtgccgttaatatacttggggacgcgaaatagattccggctcatggcgttaaccaggtagaaactgtgtgtacagttgcgttgtgcgtaacgtaaaagcagggcggttaaacctagaaaataaatcgtttgactatctacgttaaccttagtcggacccacgtacaatttggtgttccaacgcggtacattgaaaaacatggggttgaacgtggtgaaattaccgcaaccttgttcgccagtatcattacgtttggaaacgtttagcatttcggaaagacaagtcatggaaggcacagtaccacaaggtgggggtctgaatgttatcgttttagccgtatgattgtactgtgagtaaacgtattttgcgggttttctaagctgggtactataaaaatcaaaccacagataggttatactataattctgaatggggcccgctaaaatgtagtattgtggaaactctgtcatgttcatagtgagatttttaaccggttgtttacttacattgtattttgtagaaatagtcgtttctagttgtctcaaaatttctaacttaagctgatctaatttatatttgcctatcttagacagtaccaagcccctccaaggacgattataaagcgcttttgacataactttacagtttatgaaagaaacaagcaagaaagatatagatattagaaacaccatcttagggacgtctctcaccatcatctcttttctccccatgacagaggaggagaccccgcaccgtccgtctgccttgtggtttggcttgcctgcgtgtactcactgctgattctggtcgttttgctgctcatctaccgttgttgcatcggcttccaagacgacctagtctcccgcaccttggctgtgtaccaagcttgtatccagggcccgatatgtaaccagacccataacagtacctcgtaaataaagacgcacagacctcacgcatatagtaccatcacaccgtgtggcgtgtactttattacaacgagcaagagtgcccctaagtattggggcccgtaccgttttagaagattttgtgtgaatgtctttaacttttctgtcccttttctcataaactgtcaggttctacagtcagcatgtcttgagcatgcggtagagcagatagatgccgatgatggccgatagcgcgtagacggacatcatgaggagacgactgtcggtggcgtccacgacgacgtcagttacttctaggaccgtaccgtttttcaaaagcatgaggtagtgagttcgcggagatgagaccaccacttcgttgtagggatccagggcgaaaaggacgtcgtccgagtcgtgcatgtacatgatgttgatgacgccttgcgtgtcgtcgtattctagcagggcgctttggcaaaaggcgcagttttctagtgaaatgttgagcgccgctgtgatgctgtgtgtggtgtgcatgttgcgcgttagttcgcatttagtttgactgtccgtttgggtgatgatgaggctctggcctacgacggtggtggagacagggtaggagatacctttgatcaggtactggtttgttacgacataactgacgtgttcggagacggttagcgcggagaaggattcgccgagcggcagacaaaacaggtcggggaaggtttccagcgtgcttggttgcatggtagataggatggagagggcggcgggaacggtagcaggaacggtggcatcggggaagagacgcgtgaggcgttcgagcgagtgatcgcgtcgcccgctactggaacagggtgtgtacaggtcgctgaggtattcgtggtgcggatgagctagcaactgcgtaaagtgtgatagctcggccaatgaacagaggcccgtttctacgatgaagatttcgcgtctctccgtcgtatgtaccaacatggagtggacgaggctgcccatgaggtagagttcttggcgcgcgaaggctgaaagaaaagaggccaggtgcgttttgtgtaattgtagggcaaagtcggcgatctgtcgtagtgcccactggggaatgagatgttgctgattctgtttagaaagtatgtagaccaggcgtacgaggctggtgatgtcggtgatctggtccggcgtccagagggctcgtttggccaggtccacggctgtgggatatagcagcaatgtggtgcgtggtggtgtttgtgagaggcaggtgatcataaattcttgtatttgtaagagtgcggcctggcggtctagggctcgtgggatggagatttcggtgccggcctcttcttgtcgggctgccgcgaacagtgctaatgcgtaggcgaaggccatttctaccgtgcggcggtccaacatttgacatcgaccgcttttgagtacgtctacagcgtaacggtgaaagctgttacgtaacagtgcgctgaggtccaggtagttgaagtcgagtgcggcgtcgagaaagtccgagtctttgagataggagtgacggtttagttgagctttcttaactagtaccaggagctcgtgtttttcagtttgtcgtagtataaagttgtcgcgttgatagggcgctttgaagagtacgcgtggaagatgaccgaagataagcagcatgggtgtgtcgtcgtctatagataccgtaactacgaagaagtcctcggtcagtgtgattttaacgtaacgtagttcgtccatgaggtaaaagccctggtgcagacagggcgtaacggtgctgaaaagcagatcgtgtccatcaaagaggatacaggtctggttaaagtgtggccgatgtagtcccgaggtggtgtgcgatcccttccagtcgtgtggagtggtttggggtggcatccaaacgtgaggtattgacagatcaatgggcggtggcacggtggtgggctgctgacccaggctgtcttgtgccttcagctgctgcgaaaaagatcggtagctggccaggtctttggataccaatgcgtaggtgttaagtctctgttggtatctttctagggtttcggtcagatctacctggttcagaaactgctccgccagaggacccgcaaaaagacatcgaggcatatggaatacatagtattgattatagctttggaaaaagttgaaactgatggcgttttccctgacgaccgtgctgttacggaggctgctgttgtaggtgcactgggtggtgttttcacgcaggaagcggatgggtctcccgtaggtgttgagtagtaggtgaaatgcgtgagggtccagcgcttcggatgcggcgtccgcgccatatcgttgcgaaggtaggtgactgaggaggtagacggtgaagacagtgaggtagggggggaggccgggccgcatagcgcggctgcgccgctgggttcagcggcgtgatccaggtggtggttggcgttacacccgagagaaggagagaaaggatcccaggaaggggcacccgggtgtggcgctacgggttacaaaagtcgcgtctctgtctatttaatacgatgtcattggccgctgcgaaggaagaagaggggacacgcgggtaagccatgccgtccgggcgtggggacgacgctgattcgacggggaacgctctgcggagattgcctcacgtgcgtaagcggatcggtaagcgtaagcacctggacatctaccgtcgcctgttgcgggtctttccctcgtttgtggccctcaaccgcctgttgggaggccttttcccacccgagctgcaaaagtaccgtcgccgtcttttcatcgaagtacgattaagtcggcggattcccgactgcgtgttggtgtttttaccgccggactctgggtcgcgcggcatcgtgtattgctacgtgattgagttcaaaactacgtactcagacgccgacgatcagtccgtgcggtggcacgccacccacagcctgcagtacgccgagggcctgcgccagctcaagggcgccttggtggactttgattttctgcgtctgccgcgcggtggcggtcaagtctggagcgtagtgcccagtctggttttttttcagcaaaaggccgatcgcccatctttttaccgggcttttcgttcgggccgtttcgacttgtgtaccgattctgtcctggactatctgggacggcgtcaggatgagtctgttgcacaccttttggcggctacccgtcgccgtcttcttcgaaccgcacgaggaaaacgtgctgcgctgccccgagcgcgtgcttcggcggttgctggaggacgcggcggtgacaatgcgcggcgggggctggcgcgaggacgtgctcatggaccgggtgcgcaaacggtatctgcgtcaggagctcagggatctgggtcacagggtgcagacttactgcgaggatctcgaagggcgcgtgtccgaggcggaggcgctgttgaaccagcagtgcgagctcgacgaaggaccgtcgccgcggacgctgctacaaccaccgtgtcgtccgcgttcttcgtccccagggaccggcgtggcaggagcttctgccgtcccacacggtctttatagtcggcacgatgccatcacgggacccgccgccgccccgtctgacgtggtcgccccgtctgacgcggtcgccgcgtcagcggccgccggtgcttcttctacctggctggcgcagtgcgccgagcggccgttgcccgggaacgtacctagctactttggaatcacgcagaacgatccctttatccgctttcacaccgattttcgcggcgaggtggtcaacaccatgttcgagaatgcctctacttggactttctcctttggtatctggtactatcggctcaagcgggggttgtacacgcaaccacggtggaaacgagtgtaccatctggcgcagatggacaacttttccatttcgcaggagctgctgctcggcgtggtcaacgctttggaaaacgtgacggtgtatccgacgtacgactgtgtactctccgatttggaagccgccgcctgtctgctggccgcctacggacatgcgctttgggagggccgcgatccgccggactccgtggcgacggtgttgggtgagctccctcagctgttgccgcgtctggccgacgacgtgagtcgtgagattgccgcttgggaaggccccgtcgccgcgggtaacaactattacgcgtatcgcgactcgcccgatctacgctactacatgcccctaagcggtggtcgtcactatcacccgggcacttttgatcgtcacgtgctggtgcggcttttccacaaacgcggcgttattcagcatttgccgggctacgggacgataacggaggagctggtgcaagagcgtctgtcgggccaggtgcgcgacgacgtgctttctctctggagtcgacgtctgctggtcggcaagctgggtcgcgacgtgcccgtctttgtgcacgaacagcaatatctgcgttcgggcctgacctgcctggctggcctgctgttgttgtggaaggtgaccaacgcggatagcgtcttcgctccgcgcacgggcaaatttacgttggccgacctgctgggttcggatgccgtagccggcggcgggttgcccggggggcgcgcgggcggcgaagaggagggctacgggggacggcacgggcgggtacgtaactttgagtttctggtacggtactacatcgggccgtggtacgcgcgcgaccccgcggtcacgctgtcgcagctctttcccggcctggctctgttggccgtgaccgagagcgtgcgcagcggctgggatccctcacgtcgcgaggacagcgccggaggtggcgacggcggcggcgccgtgctcatgcagctcagcaagagcaaccccgtggccgactacatgttcgcgcagagctccaaacagtacggcgatttacgtcgcttagaggtacacgatgccctgctctttcactacgaacacgggctagggcggctgttgtcagtgaccctgccgcgtcaccgtgtgtccactctgggctcgtccctctttaacgtcaacgatatttacgaactgttgtactttttagtgttggggtttcttccgagcgtggcggtgttgtaatttccaccacgtgtcgctcgctgcataaagggcgaacgtcctcggagagggtatattcgttcggcgagagcgggcggcggtggtgggtatgtccccttctgtggaggagactacctcagtcaccgagtccatcatgttcgctattgtgagtttcaaacacatgggcccgttcgaaggctactctatgtcggccgatcgcgccgcctcggatctactcatcggcatgttcggctccgttagcctggtcaacctgctgactatcatcggttgcctctgggtgttgcgtgttacgcggccgcccgtgtccgtgatgatttttacttggaatctggtacttagtcagtttttttccatcctggccaccatgttgtccaagggtatcatgctgcgtggcgctctaaatctcagcctctgtcgcttagtgctctttgtcgacgacgtgggcctatattcgacggcgttgtttttcctctttctgatactggatcgtctgtcggccatatcttacggccgtgatctctggcatcatgagacgcgcgaaaacgccggcgtggcgctctacgcggtcgcctttgcctgggttctttccatcgtagccgctgtgcccaccgccgctacgggttcactggactaccgttggctaggctgtcagatccctatacagtatgccgcggtggacctcaccatcaagatgtggtttttgctgggggcgcccatgatcgccgtactggctaacgtggtagagttggcctacagcgatcggcgcgaccacgtctggtcctacgtgggtcgtgtctgcaccttctacgtgacgtgtctcatgctgtttgtgccctactactgcttcagagtcctacgcggtgtactgcagcccgctagcgcggccggcaccggtttcggcattatggattacgtggaattggctacgcgtacccttctcaccatgcgtcttggcattctgccgctctttatcattgcgttcttctcccgcgagcccaccaaggatctggatgactcctttgattatctggtcgagagatgtcagcaaagctgccacggtcatttcgtacgtcggttggtgcaggcgttgaagcgggctatgtatagcgtggagctggccgtgtgttacttttctacgtccgtccgagacgtcgccgaggcggtgaaaaagtcctccagccgttgttacgccgacgcgacgtcggcggccgttgtggtaacgacaaccacgtcggagaaagccacgttggtggagcacgcggaaggcatggcttccgaaatgtgtcctgggactacgatcgatgtttcggccgaaagttcctccgtcctctgcaccgacggcgaaaacaccgtcgcgtcggacgcgacggtgacggcattatgagcggcggcgctgtacggcagcggggagaaaagtggcagataaatcacgtcaggttcacacgtcgttagccagcgtcggcatatgaagggcgcgggcggccagtacggcctctgggctgagacaggacgaggcagggtgagaaagaggaggatgggggggaccggggtggtggtgctgctgctgttgtgggtgcggacggtgcgggtgccgggacagcgtgccggcgaacgttctgtaatcttccataataaaagtaaaaatgcccgtctcgtgtcgactccgctggatctcgaaggcgtcgggggtaatgcgcatcttgccggtgccgatgagataaaagtaccacattttttgacagatgatgcgaatcaagggttcgtacgcttcggcaccccagtggcgcgtgaagaaggccgccagacgaaacaagcggtgtccgtagagcgtgcctagggagaagaggatgttgccgttgcgcgccaggtcttcggggaaaacgaccggcaggccggtgtggcgctgcacaaagcgcgtcagcagtccgccgctcaagcgcgggtgacacaggcgctggctgagacgggcggcgcgcgtttcatcgaacacggccgcctcaaagtccagccccgggaaggcctggcgcagttcgcggtacagatgaggccagtagggttgcggcgtcttgcgactaagcacggcgtggtccgagacacccaggttgttcatggtttcgcgcagtagcagcgtttcgagaccgcggtgaaagaggaggacgcagatgaggcgtacgatcttgagttcttccaaacgcagcgagctcagcggctgtccgcgcgacatcttctcgctaatctgtaatattagatgattggcgcaagtaaaggagaatttgcccgtgcggacccgcgggacggcggggttctcttcgtcgcgggccatcatcgttcgctcggtgagcgggtagcgacggtgacgacaatgacgatggacgagcagcagtcgcaggctgtggcgccggtctacgtgggcggctttctcgcccgctacgaccagtctccggacgaggccgaattgctgttgccgcgggacgtagtggagcactggttgcacgcgcagggccagggacagccttcgttgtcggtcgcgctcccgctcaacatcaaccacgacgacacggccgttgtaggacacgttgcggcgatgcagagcgtccgcgacggtcttttttgcctgggctgcgtcacttcgcccaggtttctggagattgtacgccgcgcttcggaaaagtccgagctggtttcgcgcgggcccgtcagtccgctgcagccagacaaggtggtggagtttctcagcggcagctacgccggcctctcgctctccagccggcgctgcgacgacgtggaggccgcgacgtcgctttcgggctcggaaaccacgccgttcaaacacgtggctttgtgcagcgtgggtcggcgtcgcggtacgttggccgtgtacgggcgcgatcccgagtgggtcacacagcggtttccagacctcacggcggccgaccgtgacgggctacgtgcacagtggcagcgctgcggcagcactgctgtcgacgcgtcgggcgatccctttcgctcagacagctacggcctgttgggcaacagcgtggacgcgctctacatccgtgagcgactgcccaagctgcgctacgacaagcaactagtcggcgtgacggagcgcgagtcatacgtcaaggcgagcgtttcgcctgaggcggcgtgcgatattaaagcggcgtccgccgagcgttcgggcgacagccgcagtcaggccgccacgccggcggctggggcgcgcgttccctcttcgtccccgtcgcctccagtcgaaccgccatctcctgtacagccgcctgcgcttccagcgtcgccgtccgttcttcccgcggaatcaccgccgtcgctttctccctcggagccggcagaggcggcgtccatgtcgcaccctctgagtgctgcggttcccgccgctacggctcctccaggtgctaccgtggcaggtgcgtcgccggctgtgtcgtctctagcgtggcctcacgacggagtttatttacccaaagacgcttttttctcgctacttggggccagtcgctcggcagtgcccgtcatgtatcccggcgccgtagcggcccctccttctgcttcgccagcaccgctgcctttgccgtcttatcccgcgtcctacggcgcccccgtcgtgggttacgaccagttggcggcacgtcactttgcggactacgtggatccccattatcccgggtggggtcggcgttacgagcccgcgccgtctttgcatccgtcttatcccgtgccgccgccaccatcaccggcctattaccgtcggcgcgactctccgggcggtatggatgaaccaccgtccggatgggagcgttacgacggtggtcaccgtggtcagtcgcagaagcagcaccgtcacgggggcagcggcggacacaacaaacgccgtaaggaaaccgcggcggcgtcgtcgtcgtcctcggacgaagacttgagtttcccaggcgaggccgagcacggccgggcacgaaagcgtctaaaaagtcacgtcaatagcgacggtggaagtggcgggcacgcgggttccaatcagcagcagcaacaacgttacgatgaactgcgggatgccattcacgagctgaaacgcgatctgtttgctgcgcggcagagttctacgttactttcggcggctcttccctctgcggcctcttcctccccaactactactaccgtgtgtactcccaccggcgagctgacgagtggcggaggagaaacacccacggcacttctatccggaggtgccaaggtagctgagcgcgctcaggccggcgtggtgaacgccagttgccgcctcgctaccgcgtcgggttctgaggcggcaacggccgggccctcgacggcaggttcttcttcctgcccggctagtgtcgtgttagccgccgctgctgcccaagccgccgcagcttcccagagcccgcccaaagacatggtagatctgaatcggcggatttttgtggctgcgctcaataagctcgagtaagagagacgctatatttagggcttccctctcttttttttctacaccgtgataccctaataaagcacaccgcggttattatcaacgtctctgtgtttttattatttagaaataaatacagggaatgggaaaaacacgcgggggaaaaacaaagaagtctctctctagatgcggggtcgactgcgtggggtgctggaagtggaagcggtgctgatgggtgagggtcgtggcgcgggcacggaccgcaacgtgctgctgatgtctgccgcggtacgcacgtcgccgtccatgtcgctgcgcagataagaggtaggtcgtagtgcggcgtgctgcacgctcaccgttaatggtaccaagtcgtcaaggctcgcaaagacgtgccacgaggggatgacgagcgtgagagccccgttgttaccgcttcgacgtctttgtccggtcaggatcagtgccggggacagtccggcttgggtgtccgagtcctcgtcgccgctggcttcctcgaagccggcaaacatggcttcggacaggggggtcggcgtcggtgtggaggagaggtcatcttcgtcgtcctcttcctcttcttcctcctcttcctcggtgggtggtaatccgggggactgcgggagaaactcggagacggcgccgcgcatgacgttgctccgtggaaagagaccggcgcgcagctgcacctggggacgcttgattttgtccggtttaccgggtgtgagagtccaaaacccacggcggaaaaagtggatgcggcctagcggctgtcggtgttccaaatgaacggcctgatcgccggtcagcgtgacgcggagggtgattcgcacacgatcgggtagcgggccggcttctatggagacgcccgggatgttttccgggaaaaagatggtgtcgtgagtctgattggtctcgaaagcattctggatctgcacgatgtactcgggatgtatgcgcgtcagcgtaaaacttttgggaatcaacagctggaagccgttgtccggcaagcgtcgtaggtgcgggtacggattgtgtcgcgccaccacctcggcgcgatgcgtgtaaaccgaaaagtgcagaaacacgctggtcggcgggtgcggtgagtcgtgatgcagaaacagcatgatccattggcctcgttcgtccgtctccgttttgtggatgtacgtgttagggtccgaacaggccagctgctccagggcgtctaccagcgtcagcgggatggcgccggcgcgaaaggcgaactggctgacaaagatctgccctgcctccaaactgctgtcggttctgcggcgccagttcggcgttacggtcagtcgcacggcccagtggtgagccgtgcggcggatgatggcgcgcgcttccattcgcggccgattttcttcgccgccgcgccgctggctctgaaagaggtgcagtccgctaacgggcacgcggtccagcggcagcgcaaaggccagtaccgagaccgtgttgttttctgagcctggcgtcaggcgtcgtgggccaaagttgttgaggtccaccagcagtcggtcctgttcgcccaccacgcagcggcccttgatgtttaagtcggtcaggtctacggtgtcgtgcggagatttgttctcctgaaaacagcagagaaccgagggccggctcacctctatgttggtacgcaggtccaggagtcgcagacgaccggcttccagcgagccgccttccacgttggtgatgagccgaagcacctggcagtgcaggcgaccaaagcttccgctggcggcttcggcctcgctgatcgcggccgcttccgacgagggtccctcaccgggcgaggacgatgcctgagacattgcgaaggcgggatggggggagggtcaggggatgcgcaaaggtgaacgggtcttcgtgggaggtcgggaagggttccggcaactgtcgcaaatatagcagcggtgacaggtgtggcggccaaaagttgcgtgtctgagtggacgtgggtttttatagagtcgtcctaagcgcgtgcggcgggtggctcaacctcggtgctttttgggcgtcgaggcgatgcatggcccgggcaaggcgtcttgccggtggcggcgacgtttgggttgcgcagcgggctgccatacgccttccaattcggcgaagatgcggtagatgtcgttggcgtcccagaagaattcctggtacttcagattctgaccctgaaccgtagccaccatgggcaccaggttgcgggccaggatgccggcctgccagggcggccaggtgaacacggccggattgtggatttcgttgtcggaatcctcgtcggtgtcctcttcgggcgcgacggtggactcggccttaaggcggccgcgtgtcataacgcccgacgtgcacgccgtcgccgaggatgctgatttgcgtttgcggcccgcggaagtggaggcgcccgccatggcgccgccgccggtgacgcggggcgtcttgcgctcggtggttacgagttcttcgtcggagtccgatccgctggtccagacgtcgtcgtcgccctgggcggcaccctcgtcgtgccggtcccaggtgtgtcggtactcaagcttgccctggatgcgatactggctggtgaaggtggggtgctcgctgtactgaggcccgcgctgcagcagcaagtcgatatcgaaaaagaagagcgcagccacgggatcgtactgacgcagttccacggtctcgcgtatggcttgtacctccaggaagatctgctgcccgttcatcaacaggttacctgagatgctcaggcccgggatgctcttgggacacagcagcccaaaatgctcgtgtgaggtaaaagccacatccagcatgatgtgcgagatcttgcccggtttgattatcatatttttgggacacaacaccgtaaagccgttgcgctcgtgggggcgcatgaagggttgcgggttgcgggtcatcgtcaggtcctcttccacgtcagagcccagcgtgacgtgcataaagagcttgccggagggcacgtcctcgcagaaggactccaggtacaccttgacgtactggtcacctatcacctgcatcttggttgcgcgcgtgttctccatggagcaaaccagctcgtgcgcgcacaccacgtgccgcagtgccacgtccttggtgggaaacacgaacgctgacgtgtagtagacgtcgggctctttccactggttctgctgacgcgtccaggccagtcccgagaccgtgagacgcgcctgccacatctgcttgcccgacgcgtgaatcacagcgtcagctacgggcaggtgtcggtgtttgcgctcggccgccgacgggtagtggtgcacgttgatgctggggatgttcagcatcttgagcggcagcgcgtacacatagatcgacatgggctcctggctggggcagatgcttcggcccgtggggttgtgcacgttgaccgacacgttctccacctcgctgcccgtaaagtacgtgtgctgcacctgcagctgattgtcgccgcggtggcatggcgtcgagtcgggcgtgtactgcgataccaagatcagcgagggctggctcacgcgtacgtggatacccgtctgcaggagtcgcgtctcgtgcggcagcaccggcgtatcgccgcgactaaacacggctttcagcacgtgccccgaaatgggacccagtacggatatcatttcgggacaacggcgaccgcgcgactccatgctgcctgcgcgtacgggtgtaggcgactgagcggcgcgccctctgcggccgccgccttacataggcaggcgaccaaacgcggaacccgaaataaaaacgttctacacagagacaaccgcggattattgagtgtctttttttattacaaaaaaaagaggcgaagccccaccgtcaccacaccccatcacacaccaccaccgatttttttttgttttaatcccgtatggcgcggacgcctagtgtccgtttcccattatcagggtcctctgtttagagatcgccgcagaccatggctaaagtgacaggactcgtcttctctgtcgtattttccgtaagcttacagtcttgcggttccgtctccggggacgccagtcgcatgggcagcaggtcctccagcgcgatggaagcgcccagcaccgagagctgctgttgcgacggcgaatgggatgtggaccgcgagtgtagcgtggatttgacttggtgcgtcattgctgacaggcaaccccgattcagcgtatgctttgacgagataaaatagaggcgccccaggagcgcgtcccgtgggaacgtggcgccgttctcgtcgctcaccagtacggttaattccaaccaggagcgcggtagccagaccgtaacgggcattttgagtccctgacggttgtgtggtacaaaaacacccagataaggcccgtaaaagcggcggtagatacgtaacgtgtgcgagttcttcagcgtcaattcgtaagggacgcgcacctccagtccctcgtccgccgcgccggagcgtggcggtacaaagtaaggcagtggcgcgtccgaaaagaagggtcgtcgcaccgtttcgcgtcgcagccgcaggcgaaacgccactgggtcggctggcgcctcggtgcggtcgcaggtcacgttgaaacgtaatatgccgtcttggtatagcgtgagtgacgacagcgtcaggtccggcggtgattcgttcgggtctagctccaatcgtccaaagacggagggtcccaatgtcttggccgtggtttccgagaggcgcgccgagatacggctggtgagtccacgcggccccgagatgccgccttccactcgatgccagcacagcgcgtgtcgtacgcgcaccgtcagcgtgggcgtcagatccgcgtccgttgattccgcggtatcagcgacggaagccgcgttctccgttacgttgtttatatccagcgtcggctcgaacgtgagttctggcagatgcagcgccagacagtcgtgtaacgccgtgtgatgcgcggctttacgtcgtagcggtagccgtttcaacagcggcgtgatgatacggagcgcgaagagattgagtgataggcgcacgatggccatgcgcgtcagttgttggtcaattaccgagcgcaggatatggcagcctgggcgtgcgggaaagagagagaaggccgggcgcacgtcagaatcctcgttagagaccacgcatagaatgccgcgttcacgatcgtcgttgcggtcatcctcgtcctcttctttcttctcttgtttttccttttttttctcgggctcgtgggaagccgccgtttcttcttcttgcaacgtcgcgggggcggtttgagactcgtcgttcgcttcccccaattgcagcggcgtagagagcagaatctggaagggatcccgcaattcttcgggtcggaggtcgaggtgcaactggatcagatggtaggtgccgcggtgcacccgaggctgacggatgtcgtgtttatccgtcagtgtgaggatggtctgcggcgagccgctgtacttgtccagctcgtccggcgttttcaggaggagactgtcgtcgtcggtactggcgacgcccatcatggtcgtggtggtagtggtggcgaggaaagtgagcggcggcgccgacagagctcggcgttggcggcggcattttccgctgtgtcggctgctattgctgccaacgccaccgccgccgcctcgtctggctcgtggccggcgggcccgattccgaaggttggggtcgacgcgtggcatgcttggtgtctgcgggcgcgagagggccggctcagcctttaaatatgcaggtcgcggatttgttatcgggtgaaacgtcacacaccgtgaagacgacctgttcgcggatgaggtcatccagctgtcgcagcatgacgaaaagcgccgacagccgcgcgatctcgtcgtcgggcgacacgtgctgcggccgcgcgggcgtgcgcggctcgccgacgctgcgctcgcggtccagccgcatcagcagctcctggcacttgacgagcagcatggagctgtcctctagcgccaacttgcgcacgtaggtcatggtcagctccgaggctaggttggccaccatggacatggagaggcaggcggtcttcatgtcgatcagcaggtgctggtcgatgaccggatcggggatggtgaaggtggcgtcgcgaaaagtaatggtctgcagctgctgcacggcagcctttacctcctcgtacgaacggtcgagcgagaagaggcccatgatgagtagtcgctggttgatttccagcgccagtggcatgggtacgatccagggcagcaccagctcccactggcccagcgtcagcaggttctcgcgcgccagcggtccgtggaagagcggcggcagcacgcatagcgcgtcgcccttctcccaagtcacgggtcccgtgttgaggacggtgtagagcagtccgtgcgtgggtacgtgtaggaggatctggttgccttctacgcgccgcatcaacgtcagcgtcatattgcgcagcaggccgcgcagtcgtacgtagccgcgggtgtgatctacgaactggtgtaggcccagctggtagtgcttgatgagatgtagacgttgcggaatgggcacaacggccgctactagcttggtcagtttgcctacgtcggcgatgctgagcttgtggtcgaaagtgcagaagatgttggcctccatggccgccatagcggcggtgaaatcctggccgcgacggaggagaggcagagacgaacaacgtctgcaccgggcgcggcgtcagagcgagcgtggcgcgtccgggcccgcgtttgcgtctaggtgactcgccgctaacctgcggtcgtcgccgtcctcctcaccggacggcctcacgagttaaataacatggattgctgcagcgggatgatttcgcctacgacgtagttaccaaagtgcgtttcggacgtagcaaaagccccggcgccacccttgagtttggtctccatcagcgccagcgtggtggtgctgaggatcggtagcgcttcctgcgtcagacggcacgggttttcgatgagttgttccgtgccttcgacgcagacgtactgcgtgtccgtgtcgccgcggatgcagtccttggcgcgtagcaggtactcgtcgatggttttgaagagcgttttgttggccgcgataatctcttctgtgttaaagtactgcgcgcaagggctgtagaatttggagttgtagcctagacgttcgcgatgtcgggtgttgtagagtacgtcgctcagacagccggcttgcgaggcccaggggttgtgtgtggccgcgaaagtctgtgcgtccgcttcgcgatggtcgtagatggccttggtggcggcctccgtgtcgtacggatcgacggccagcatgcaggaggcacgcccgcgcgggttgttggggatcttaaagtaattaacgtccatcgtcaccggcgtaaggattagttcgcacgcggccttttgtccgtgcaccgtggcggcggcattgcgctcggacatgctgccgaacgtcagcatagagatggtctccgtgtctaacagttgcggccgttctacgccggccgcgtgccggatccagcggtccacctcgtcgtgccggtacacgttcatagggaagacgcgaaagaggtcctgcacgcggacgcccatgtcggttcgcacgcggtttacgtaggctacgcaggtatttgacgtgtaacccagacccatgtctacggtgttaatgttctgcgtgacgtggtacgtagtgctgatgtcgcgttcctccttggtcacgatagggttgttgatgataactgacgtgcatgatttgccgctgtagagcagcatgtccacctcgaaggtgtcggtgcgtacggccgtgagtgcgaatcccgggtggatgtgcgccttggtctgcagcaccagtgaaactggtgagattttgtataacatggcggccagcgtcatgactgagtgcaacacgttgggacaggtggccgagtaacgcgaaaagggcgagcgcagccagttgtggtactcgtgcgcgaaggctgtgggtagcgggaaaccaccgtcgtgacggtgatagtgcgggaactcggtcacgtagcgtttaatgtcgtcgctcaacgccgcgcagatggtggggtttgagtagaaacggtggaaaggtacgggtaggctgtactcgatcaacgtcttaggcgccgtcacgacgcagcagccgttgtaaagcacgtgctgacgtgagataaagtccggcaggccctgacgctgcgcgtggtccagaggcgcgcgcacttcgagcaccttgacgtgctcgcccacgaattgcacggccaaaaacagttcacgacaggcctgcagcagcggcgtatgtgcgtcggtggcgacgtcctccaccagctcggtcagcatctcgcctacggcttgacgttgcgccgctatcgagtcttcgggggtgacaccgcttgtgctctctttcgacgtcgtacctgacgtggagaccgcggtggcggccggcatcaggagaaacgccggtcggtaaaagaggtctactagcagcgtcttgaggttgagtcccaggccgcaggcccggttgttggtcatggcgggcatgaggcagagataaaagaccttttgtaacgtccattcgtcgtcggtggcacggtaatcgtccacaaacagcggctcgtcggcatccatggcgcccaaacgcggtacgtccgaaacgccgtggtgtcgcgcctcgatgttggccgggttcaacggttgccggtcggccactacctgtacgccttccatgttacgcggcaggtgcgtaacgaaggggggccacagccggtggtcgtgcagcgcgttcacgtaagccgatagcggttcctcagccagttgaccgttgttaagtcccggcagcgctgagatgcgcgttaccagacgcagcacggcgaccagattgcggtagtgaaagagcaactgcggtggtagggcgccatcagccaggtgttcggcgatcaacgtcaccagcgcgtagctgtgcgcaaaaaccagcagctgacgtgtgtgaaacatgttgacgatacaacgtgctacgaaagtgcggattagcaaaaaagcgtcgacgttgccgtgtaccagcacgtcgaccaggtagcaaagctcggggtaattggggcttgtcacggtggttttgaaaagtcgcaacgtctcttcgtagtcgggtggtggccgcagtcgcatgtgttccatgatctcccaggtgcgcagttcgtggaaggggcccggtgccagtccatctggcaaattaccgatgacgatacgcggtgtacacagcgccaccgtttcgctgttttcctggcagtgcgtaaagtcgaagaaggggtgcagctcggtgtagagcgtgatgttgcccaccttgtagaagtcggtgaccacaaagtcctgcttcatttcgttcaccgtgcgcgggacctcgcgtcgtacgcggtaaaaatgcggtatgcggcgcgccgcaccgcccatgggttcctgctgaaaacgacactcgagcagtcgttgcatggcgggttccgagggcggtccgcgttccgtgaaggtctgtagacagggcgcgggctcgtgcagcaccgggtggcacagcgtcttgagcgcgtccacaaagtctattttttgtacggcacggtcccggtttagcaggtaggccgtggtgggcaacgcgttgcgaacggtgtcgttaagcttaactttgctttccaccgtggtgtaaccgcgatcctcgggcagatacagccctacggggaagaaaaacgtcaggtccacgttacgttctagcggatctttggtatcggtgtttttgtagacgcgccgcaagttttccataatcaccgttttttcgcccagtcggatcacgtccatgctcagcggcgttaagctgtgcgccccggcctgcgaaagcgagtcgttgggcaaatgcggttggcccgaagtcagatgagccttgtacgagttgaaatcggccaggatcgagtgataggatatggcagtgacggcattttcgggactgagtacaaaattgccgtaggtggccggcgccgagaccgtttctttggtgatgtggcttgagagcagcgacatgatgatctgcataacgttggccgtgcttaccatcacgccgctgatcttggcccccgagctcgtggtgtacgtggtggggttgtctaggatgctatcggtggccgcttcggccagacgcgtgaggaacttgagcacatagtcgcgatcgcgcgtgcgattcagcaaaaagagcgtggccagcattttggccttgaagctctgcaagatgttgcttcgctggatgcggttcagtgcctgtcgcgccagtgtggcgttttctaccagcgtctgcaccacaaagtacggcggcgccttgcgtagcagtgtctgtaaaaagctgtgaatcaagccgcgctccatggcgtcggccgtgtttttaagcgcgcgcagcaccgtgtgcatggcttccacgttgaggatcttgtccaagatggtgccctcgaatgtctcgcgcagatacgtgaggcaggctgcgctgagctcgaaggggatggtgatgggggatttttcactgtatttggtgaccataatggtggtctgacgactagtgggcaaaccggcgccgctggccacacgcggcacctgcacgtggaacagcattttgcccgtagtcagtttattgaggtcgtggaacttgatggcgtgcgccgccgcggccaagccgctggtcaaaaaataaacccattccaggcgattgcagaaggtgccgaagatggcttcgaagtgaatattgtaacgctcggggtcatcgccgtagtagatgcgtaaggcctcaaacatctcctcgccggcgctggtcttgacgtgcgtcagaaagtcagtgggaatgcctactttaggcaggagctcgagcgccgaccagttctccatcgcggcggcggcgtgagcgcgaggcgtcggagctcggggaaagcagcgcgacccggagaatggccggcgctgcgccgcgccgcctcggctgtgacgctctaatagtcgttggcggctccgctatgccgcgccgggttttacacgtccccgtgcacgttcgcgcctgcaacctcacccaagagctatcgacgggcgaggacgcccgcttttgtcgtccgcgacccgttaacgtcgaacgggtgcgcgctgtttttgcggctctctaccgtgcctgtccgatacacgtgaggaccgagcccgagcgtgtcaagctggtactgggtcgtctgttactgggacccgtggccgtaccctgtttttgcgacggtgaagtggagggccacggtgaacatctggtacctacgacgcagttttgtcgcgggccgctgctctacgtgcaccgacgttgttgttgcggatccgtgaccgccgggcgcgcgctgtcctaccacgttctcgaaaaccacgtggccacgcatgtgctacgcggattgctctcgctgacggaatggaatcgagaattgccgagcctcttttgcgactgtcctggcggcggtggcgcctcgggaaccgaggaacgctacgctatggcctgcctgccgcgcgacctcagcctgcacctggacgactatccttacctgatggtggaaatcggacgcgtactcagtgtcagcgaggtagacgactacgtaaccgccgtctccggctacctgggcgaggccgcggcgccgcgcatccaggttcactacaagctgctctttggactcaacgtgcgtccgcaagcgccgtgcgcgttggacgctacacgcgacttttttctgctggagctgcaaaagctttggctgggcgttgaatatcaccacgaagtcacgtcggagtttttcggtcgcgtactggctcagctgcatcgcgaccgcgcccgcgtcatgatggcgcttcgcttgcccgagcagacggtgtgccacctgagcaccttcgttctcagtcgcttcaagcgacaggtactgtacttcaagctacaggtgagctacggcaagtgccggactggtcacgctgacagaagtgggggaggggggaacggtggaaatcagggacaccacaacctactgtgttatcgacgccttagcgtcacatttgccgacacagacacggtgtggagaaaccttttctacgtttattacgaactagctcgggatctggggtcccatgggacggaggaccgacccgtaagccgcggttacggtgtttcttgcgcttcgaggacgtcgcgactgtcaccgtcagaatcgacggtggtttcggcgaacggacacgcgctgtcttccaccgcgctcccgacgacgagcgcgggtcacaagctgtcactgccgcgcgacccggccgcagatcgcgttcgacgttacgtatgcattatctcgcgtctcatgtacgctcggtacggggagagatggcgtaaacactgtcaacggcggtcggagacgggagaagaggaggaggaagagacgctggaatcgggggagactgacgccacgccgccatttgactttacggggcagcagctgcgccgggcctatcaggaacaccgacgtcgtaaacatctagccgtgcagcgttacgcgccgtgccgtcgtaagctcatcggcgggatggagtttgccgaggtgacgggcgtgagtctagaccgcatcgccgtcaacgctttcaacaccaaccgcgttatcaatatgaaggctgcgctctcgtccatcgccgcgtcgggtctcggcgtacgcgcgccgcggcttcccaagaacatgacccacagttttgtgatgtacaagcacacctttaaggagcccgcttgcaccgtcagcacttttgtttccaacgacgccgtctacatcaactcgctcaacgtcaatattcgcggttcctaccccgagtttctgtactcgctgggcgtgtaccggctgcacgttaatatcgatcacttttttctgccggccgtggtgtgcaacagcaactcctcgctggacgtgcatgggctggaggaccaggcggtgattcgctcggagcgcagcaaggtgtactggaccaccaactttccgtgcatgatctcgcatactaacaacgtcaacgtgggctggttcaaagcggctacggccattgtgccgcgcgtctcgggcgccgacctggaagccattctgctcaaagaactctcgtgcatcaagaacatgcgcgacgtgtgcatcgattacggtctgcaccgtgttttcacgcaactagagctgcgcaattcgtaccagatccccttcctggccaagcagttagtgctgtttctgcgtgcttgcctgctcaagctgcacggtcgagagaagcggctgcagttggaccgcctagtatttgaggcggcacagcggggtctctttgactacagcaagaacctcacggcgcacaccaagatcaagcacacttgtgcgctcatcggcagtcgtctagccaacaacgtgcccaagatcctggcccggaacaaaaaagtcaaattggatcacctgggccggaacgccaacgtgctgacggtgtgtcggcacgtggaagcccacaagatccctcgcacgcgcctcaaagtgttagtcgaggtgctgggcgcgttgcagagtatcagcggtacgccgcacacgcgcgaagtgatccaccagacgttgtttcgattgtgctcggcggccgcagccacatcgggcctgtgttcatcccctcccccattgtgtgtgtcctcatcttcctccgtcccttctgtcccaacctccgtcagcgttgacggcagttctgaacccacgtcgccgcgagcgcggtttgcatcacgatgatggaagccgcggccgctgccgccgcggcgtttcgtccggaggagcgtccgacgccgggttggcacgacgcggcgttgttaatggacgacggtacggtgcgcgagcacgcgtttcgcaacggaccgctgtcgcaactgattcgccgtgtgttaccgccgccgcccgacgccgaagacgacgtggtttttgcttccgagctgtgtttttattgcagcggtcgttttaaccgcaggtcgtccgtcttctccatctattggcagaagcatagcgatctggtgtacgcgcttacgggcattacccattgcgccaagttggtggtggaatgcggtcagttggggagtagtaggctacggtggcgcgacggtgatgcgagtggtgaggagcgccggggagacgacgacagcagggacgagctgtacgacgtgccgggcatttatatgattcgcgtcaacgacggcggcagcaccggccccagacacgttatttggccgggtaccagcgtgctttgggcgccggacgttgtgatcactacggtgcagcgacgaatctcggcggcgcgcgccctggtgaacacgttccgccaatatttttttttgctggaacggcgctcgcacgaggagctggttctttgtccgcccgagatggaggagcgtctagcgccgctgttgcagagtgccacgcgcggtgattcggacatgtttgacggtgtggtggccagcgcttatcaccgtttgcgaatgagtaatattccgcgttcatccgcccgtctgctggaacactgcgtggggctggcgggtgctaagaagctgctcttgctcgacgtgccgcgtctggagaactattttctttgtcaagtctgtctttacgagctggacgaggacgagatgggcgaggagatgctgggcatgttggccggaaagcccgaggatgccgccgtctcgggcgcaagcggcggttttctgctacatcgcaagacgatgaagctggccgcctgtctgtgtttgttgctcaattcgctgcatttgcaccaggaggcgctggaggccttggatcctccgccgccgcgcgtcgaggagaacgaccttgtcaacgtggtgctgcgccgttattatcgcagtcacggcggcgtgcaggcgcggacgctggcggcggcccgggctttgttagccgactacgccgaaacgttttcgcccttggggagttttacgcgcctgggttacgatcgtctcgtttctgccgatgccggcgtcagtcgccggcacctggtggctctgctgcgtgcctagctgaccctgaaacggatggcgtgtatatcgtcacacaggtaggtggccatgatgacggcgatgataagatcgtccgagatacgattctggcgcttggccgagtaacgcgccgtcgtgccttcggccagcgtgacgcggtgcaggttctgaatctgctccagaagatactcgatggggtcgtggctcagcttgatggtgtaggagacgagctcttgcgaggctttgatgtagcccgagttgaaacgcgagatgaactgttccacggccagcgccttgtcgcggcccatgaggtagaagggctgttcgatgtggttctggtcgggcgtgtggtagaagagcacgcggatgagcgtgctgctctgcacgctctgtcggatgaggcaggcgatgcgcacggccgccgcctggttggtgttgccctccacggcgatgcgcagttcgtccaggtaagggtgcaggctcagcaccgagatgatcatgtgcgccgcgcactcggcgatggctacctcagaactctcggagaggtcgcgcaaaaagaaatgctctaggccgtaaatgagaaactggtgtcggtaggcgcctacggccgccacgcccgtgcccgaggccttgcggttggtggtgaaggccgggtccagatacacgtaaagcgtcttgccgaaataatcgtaggcgttggtgttgagcgtgctgtaacgcaaaatatcgaactcttcgcggctctggtccgtgatgagcacggtgttctgcgagattttattggtaccgccgatgatctcgtccatgaaagcgcccggcataaacatgttggccgtcttgcgcacttgcgagttgaggctgatgaaggtgggcttgtgcagtcggtagcaaggacacgccgtggcgtcgcccttctccgtgaagctgtgcaggtgctcttcgcacacgtaagagaccacgttgagcatgtcaaagggcgcattgttaaggcgcgtcaagaaacacgtggagtcactggtagtgttggtggacgatatgaagatgatcttggtggtattctgggccaggaaccccagaatggtgttgaaggcctctttcttgatgaagtgcgcctcgtccaccagcagcaagtggaagttttgtcctcggatgctctgtgtagagaggagacagaaaagggactcttatgattacgcacgctcgactggaagcctacagagtcggggtggggccggacaggtgagccaggtgagccgccaggtgaggcgggatcgccgtgtgccaaccgggctgcgacctgaaaaccggaaccaatccgccgacaccggcgccgcgtgacgcgcgcccataaaaacgaaagtgtcgtcgtcgcgacccgccacagccgccatgaactcgttgctggcggaactcaaccgactaggggtcgcgcacgccactacggaggatgtttttatctttgtcgaccgcctctttcaacacttttccttccttttccaggccgaggagtcaggcccgcgccgcttggaactggtcgcgtccgtgttcgagcacctgacggtggagtgcgttaacgacatcctggacgcctgcagtcacccggacgtgaacgtcgcggagacaagcaacacctgtcgtccctgcccttctcctgttccctccgcccccaaaactgtcagcggcgctcagacgtcatgtgcgacgcctcgggcgcctgtgacatgaggcacgtccagaacgcgtttaccgaggagatccagttacactcgctctacgcgtgcacgcgctgctttcgcacgcacctgtgtgatctgggcagcggctgcgcgctcgtctccacgctcgagggctccgtctgcgtcaagacgggcctggtatacgaggctctctatccggtggcgcgtagccacctgttggaacccatcgaggaggccgcactggacgacgtcaacatcatcagcgccgtgctcagcggcgtgtacagctacctcatgacgcacgccggccgttacgccgacgtgatccaggaggtggtcgagcgcgaccgcctcaaaaagcaggtggaggacagtatttacttcacctttaataaggttttccgttctatgcataacgtcaaccgtatttcggtgcccgtcatcagccaactttttattcagcttatcatcggtatctactcaaagcagaccaagtacgacgcgtgtgtcatcaaggttagtcgtaagaagcgcgaggacgcgcttctgaaacagatgcgttccgaatatggaaacgcacctgtattcggatctggcgtttgaagcgcggttcgctgacgatgagcaattgcctctacacttggtgctcgaccaggaggtgttgagtaacgaggaggccgagacgctgcgctacgtctactatcgtaatgtagacagcgctggccgatccacgggccgcgctccaggcggagatgaggacgacgcaccggcctccgacgacgccgaggacgccgtgggcggcgatcgcgcttttgaccgcgagcggcggacttggcagcgggcctgttttcgtgtactaccgcgcccactggagttgctcgattacctacgtcaaagcggtctcactgtgacgttagagaaagagcagcgcgtgcgcatgttctatgccgtcttcactacgttgggtctgcgctgccccgataatcggctctcaggcgcgcagacgctacacctgagactggtctggcccgacggcagctatcgtgactgggagtttttagcgcgtgacctgttacgagaagaaatggaagcgaataagcgcgaccggcagcaccagttggccacgaccacgaatcaccgtcggcggggcggactgcgtaataacttagacaatgggtcggatcgccgtttgcccgaagcggctgtggcttctctggagacggccgtcagtactccattttttgaaattccgaacggagcaggaacctcctccgcgaacggcgacggcagattcagtaacctggagcagcgggtagcgcgtttgttgcgcggcgacgaggaattcatctatcacgcgggtccattggagccgccttccaagatacgcggtcatgagttggtgcagctgcgcctggacgtaaatccagacctcatgtacgccaccgatccgcacgaccgcgacgaggtcgcgcgtacggacgagtggaagggtgccggtgtctcgcgtcttcgcgaggtctgggatgtgcagcatcgcgtgcgcctccgtgtgctgtggtacgtcaattccttttggcgcagtcgcgagctgagctacgatgaccacgaagtcgaactataccgggcgttggacgcttatcgggcgcgcatcgccgtcgagtacgtgctgattcgcgccgtgcgcgacgagatctacgctgtactacgacgggacggcggcgcgttgccacagcgtttcgcctgccacgtgtcacggaacatgtcctggcgcgttgtttgggaactttgccgtcatgccttggcgctctggatggattgggcggacgtgcgtagctgtattattaaggcgctaacgcctcgtctgagccggggtgccgccgctgccgctcagcgagctcgtcgccagcgcgagcgctcggcgcccaaaccgcaggagctgcttttcgggccgcggaacgagagcggtccgcccgccgaacagacttggtacgctgacgtggtgcgctgcgttcgcgcgcaagtggatttgggcgtggaagtgcgcgcggcgcgttgtcctcgcaccgggctttggatcgtccgtgatcgccgcggacgcctgcgacgttggctctcgcagcccgaggtgtgcgtgctgtacgtcacgccagacttggacttttactgggtgctgccgggcggctttgccgtctcttcgcgcgtcactcttcatggcttggcgcagcgggctttgcgagaccgattccagaactttgaagcagttcttgcaagaggaatgcatgtggaagctggtcggcaagagccggaaacaccgcgagtatcgggccgtcgcttgccgttcgacgatctttagtccggaggacgacagctcgtgtatcttatgccagttgctgttgctctaccgcgacggcgaatggatcatctgtttttgctgcaacggccgttatcaaggccactatggcgtgaaccacgtacatcggcgtcgtcgacgcatctgtcatctacctaccttgtaccaactgagcttcggaggtcctttgggtccagccagcatcgatttcttgccaagctttagccaggtgaccagcagtatgacgtgcgatggtattacgcccgacgtgatttacgaggtctgcatgttggtgccccaggatgaagccaagcgtatcctggtcaagggtcacggtgccatggacctgacctgtcagaaggcagtgacgctaggcggcgccggcgcctggttgctgccgcgtcccgaaggctacacgcttttcttttacattctgtgttacgacctgtttacctcatgcggcaatcggtgcgatatcccttccatgacgcgcctcatggcggcggccacggcctgcgggcaggcgggttgcagcttttgcacggatcacgagggacacgtagatcccactggcaattacgtgggttgcacccccgatatgggccgctgtctttgttacgtgccctgtgggcccatgacgcagtcgctcatccacaacgaggaacccgcgacttttttctgtgagagcgatgacgccaagtacctatgcgccgtaggttctaagaccgcggcgcaggtcacactgggagacggcctggattatcacatcggtgttaaggattctgagggccgatggctgcccgtcaagaccgatgtgtgggacctggtcaaggtagaggaacctgtgtcacgtatgatagtgtgttcctgtccggtgcttaagaacctagtgcactaacggggtctgacagttcacggggagaagaaacaagaaacaacaaaaaaaaggaggacatggactcgccacggtttgtggcaaggcgtatgttatcatcatggagctactcacgttggtgttgtagcaactggcaaaaagcgccgtgctcttggcgccgcggtggtcgatgctgatcacgttgtccttgttctcgaccacgtagtcgcgcgcgaaggtgtggcggcagcggaactcgacctctttgagcacaaactgcgacacgtgcttttggtgcgccacgtagccgatgctgatgccgatcatgtgcttaagcagaaacgagataatggggatgatgaaccaagtcttgccgtgacgtcgcggcaccaggaacacggtggctttctgcttaaagatgtcgatggaggtctgcgagaggaagtcgatctggaaggcgtggatgaggtactgcagcacgcgattggccagcacggggatcttggtcacggctataaaaaagatgacgtgtatcaataaattcttttgaaacggttcgagtcggatggcttttgcgtcgccctcgacggcggtactgaagccgccgtcgagccactttttaaagtcggtcatgaagttgttgatctgctgaaactgcggatcgcggtagagctcggtcaacgcgtccagcttctggtaggaggcgcgctgctcctcggagcacgggcgaaacgtcagtttatcgagcgcgctcttgaggcgctcgtgaaacagcagctcgcgctggctttcctcgggcgagttgtagtcgcggtggcggccgcagaaggccatgagcggcaggaaggcctcgttgcacgagtgggccagcccgagttcggggtgcatcatctggtagcgcttgcggcacagcgtcgccacattggtgaaggccgtggagatgcaggaggtggggtggctcttgcgcttctgcagctccgcgtagcgctcctggatcttggcggccgagtctccgcgcaacatgatggcggcggcggtggtgcgagcggaggttaggcggcagcggcgagaggagaggaaaaagatggcggccgcgaggacgacggaggatccacccgaaaaccacgttgttgcggacgtggctcgtgggacgggcgccgtcactcgttcgtcttcgtcgtccctagtggtgtcgtcttcctcggcgtcaggctcggacgaatcttcctccgcctctcctctcagtttccccgtctcctccccctcaactgccgtcaggtctccggggtccgccggggtttcaacgtccctgtgctcggtggaacggatggtcgagctgtcggcgcagtctccggccgccgatttctcggtctccgaggcttggcgcttcgaggaggccgtaaatatggcgctggtggcctgcgaggccgtgtcaccttacgatcgctttcgcctaattgaaacgcccgacgagaatttcttgttggtcaccaacgtaattccgcgcgaatcggccgaggtgccggtgttggatagcagtagcagcggtggcgatagcgggccggaggacaaaaagaaaaacgtcgggaataaaaccgcgggggaaaagaacggcggtgggtctcgggccaaacgccgtcgtagacgacgcgctccgaaaaacgacgccgccacgccgtcttttctacgtcgacacgacgtgctggagcgtttcgcggccgcggctaagcctttgccgtcgctttgtgtgcgtgattatgcgttacgcaatgctgaccgtgttacctacgacggcgaattaatctacggcagttacctgttgtatcgcaaggctcacgtggagctgtcactctccagcaacaaggtgcaacacgtggaagccgtgctgcgacaggtgtacacgccgggcttgttagatcatcacaacgtgtgcgacgtggaggccctgctgtggctgctgtactgtggaccgcgcagcttttgcgcgcgtgacacttgtttcggtcgcgaaaagaacggttgtcctttccccgcgttgttgcccaaactcttttacgaacccgtgcgggactatatgacctacatgaatctggctgagctgtacgtctttgtttggtatcgcggctacgaattccctgcgccgacgccgcaggcgacgacggcgggtggtggtggtggtagtggtggcggcggcggggccggcgcttgtgcggtcgagacgagcgcgtcagcaggccgggtcgatgacgccggcgacgaggtgcatttgcctttaaagcccgtctcgctggaccgtctcagagaggtgttgcaggcggtgcgcggccgcttctcggggcgcgaggtgcccgcctggccggcctcgtcgcgcacctgtttgttgtgcgcgctctacagtcagaaccgtctctgtttagatctcgcgcgtgacgaggcgcggaccgtgagttatagccccatcgttatccaagactgcgccgcggctgtcaccgacgtcactttgagccacatcttgcccggccagagcaccgtctcgcttttccccgtctaccacgtcggcaagttgctggacgctctctcgctgaacgacgcgggtctcatcacgttgaatctatgacgtcggtcaacaaacagctcttaaaggacgtgatgcgcgtcgaccttgagcgacagcagcatcagtttctgcggcgtacctacggaccgcagcaccggctcaccacgcagcaggctttgacggtgatgcgtgtggccgctcgggaacagacccgatacagtcagcgaacgacgcagtgcgtggccgcacacctgttggagcaacgggcggccgtgcagcaagagttgcaacgcgcccgacagctgcaatccggtaacgtggacgacgcgctggactctttaaccgagctgaaggacacggtagacgatgtgagagccaccttggtggactcggtttcggcgacgtgcgatttggacctggaggtcgacgacgccgtctaacaggtatagcaatctccgtcacgcctctgttcagattttattaaaaaaaaaacacaacataacgacagtgtcggtgtggtagctagtgcagccttaggaacagggaagactgtcgccactatgtcctccgcacttcggtctcgggctcgctcggcctcgctcggaacgacgactcagggctgggatccgccgccattgcgtcgtcccagcagggcgcgccggcgccagtggatgcgcgaagctgcgcaggccgccgctcaagccgcggtgcaggccgcgcaggccgccgccgctcaggtcgcccaggctcacgttgatgaaaacgaggtcgtggatctgatggccgacgaggccggcggcggcgtcaccactttgaccaccctgagttccgtcagcacaaccaccgtgcttggacacgcgactttttccgcatgcgttcgaagtgacgtgatgcgtgacggagaaaaagaggacgcggcttcggacaaggagaacctgcgtcggcccgtagtgccgtccacgtcgtctcgcggcagcgccgccagcggcgacggttaccacggcttgcgctgccgcgaaacttcggccatgtggtcgttcgagtacgatcgcgacggcgacgtgaccagcgtacgccgcgctctcttcaccggcggcagcgacccctcggacagcgtgagcggcgtccgcggtggacgcaaacgcccgttgcgtccgccgttggtgtcgctggcccgcaccccgctgtgccgacgtcgtgtgggcggtgtggacgcggtgctcgaagaaaacgacgtggagctgcgcgcggaaagtcaggacagcgccgtggcatcgggcccgggccgcattccgcagccgctcagcggtagttccggggaggaatccgccacggcggtggaggccgactccacgtcacacgacgacgtgcattgcacctgttccaacgaccagatcatcaccacgtccatccgcggccttacgtgcgacccgcgtatgttcttgcgccttacgcatcccgagctctgcgagctctctatctcctacctgctggtctacgtgcccaaagaggacgatttttgccacaagatttgttatgccgtggacatgagcgacgagagctaccgcctgggccagggctccttcggcgaggtctggccgctcgatcgctatcgcgtggtcaaggtggcgcgtaagcacagcgagacggtgctcacggtctggatgtcgggcctgatccgcacgcgcgccgctggcgagcaacagcagccgccgtcgctggtgggcacgggcgtgcaccgcggtctgctcacggccacgggctgctgtctgctgcacaacgtcacggtacatcgacgtttccacacagacatgtttcatcacgaccagtggaagctggcgtgcatcgacagctaccgacgtgccttttgcacgttggccgacgctatcaaatttctcaatcaccagtgtcgtgtatgccactttgacattacacccatgaacgtgctcatcgacgtgaacccgcacaaccccagcgagatcgtgcgcgccgcgctgtgcgattacagcctcagcgagccctatccggattacaacgagcgctgtgtggccgtctttcaggagacgggtacggcgcgccgcatccccaactgctcgcaccgtctgcgcgaatgttaccaccctgctttccgacccatgccgctgcagaagctgctcatctgcgacccgcacgcgcgtttccccgtagccggcctacggcgttattgcatgtcggagctgtcggcgctgggtaacgtgctgggcttttgcctcatgcggctgttggaccggcgcggtctggacgaggtgcgcatgggcacggaggcgttgctctttaagcacgccggcgcggcctgccgcgcgttggagaacggtaagctcacgcactgctccgacgcctgtctgctcattctggcggcgcaaatgagctacggcgcctgtctcctgggcgagcatggcgccgcgctggtgtcgcacacgctgcgctttgtggaggccaagatgtcctcgtgtcgcgtacgcgcctttcgccgcttctaccacgaatgctcgcagaccatgctgcacgaatacgtcagaaagaacgtggagcgtctgttggccacgagcgacgggctgtatttatataacgcctttcggcgcaccaccagcataatctgcgaggaggaccttgacggtgactgccgccaactgttccccgagtaaccgggacgcggaacgtgacggttgctgaggggaaaggcaacagagaaggtacaaacccaccggcggggaaaataccgaggcgccgccatcatcatgtggggcgtctcgagtttggactacgacgacgatgaggagctcacccggctgctggcggtttgggacgatgagcccctcagtctgtttctcatgaacacctttttgctgcaccaggagggcttccgtaatctgccctttacggtgctgcgtctgtcttacgcctaccgcatcttcgccaagatgctgcgggcccacggtacgccagtagccgaggactttatgacgcgcgtggccgcgctggctcgcgacgagggtctgcgcgacattttgggtcagcggcacgccgccgaagcttcgcgcgccgagatcgccgaggccctggagcgcgtggccgagcggtgcgacgaccggcacggcggctcggacgactacgtgtggctcagccggttgctggatttagcgcccaactatcggcaggtcgagctcttccagttgctggaaaaggaatcgcgcggacagtcgcgcaactcggtgtggcatctgttgcgtatggacacggtctcggccaccaagttctacgaggccttcgtcagcggctgtctgccgggcgccgcggcggcggacggttcgggtggcggcggctcgcactacacgggttcgcgcgccggcgtctcgccgggcatccagttcggtatcaaacacgagggcttagtcaaaacgctggtggaatgttacgtgatgcacggacgcgagccggtgcgcgacggcctcggtctgctcatcgaccccacgtcggggctgctgggcgcttccatggacctgtgcttcggcgtgctcaagcagggtagcggtcgcaccttgctggtggaaccgtgtgcgcgcgtctacgagatcaagtgccgctacaaatatttgcgcaaaaaggaggacccctttgtgcagaacgtgctgcggaggcacgacgcggcggccgtggcctcgctgttgcagtcacacccggtgccgggcgtggagtttcgcggtgaacgcgagaccccgtcggcacgcgagtttctgctttcgcacgacgcggcgctcttcagggccacgctcaagcgcgcgcgcccgctcaagccgcccgaaccgctgcgcgagtacctggccgatctgctgtatctcaataaggccgagtgttcggaagtgatcgtgtttgacgccaagcacctgagtgacgacaacagcgacggggacgccacgatcactattaacgcgagtctcggcctagccgcgggcgacggcgctggcggcggcgctgatcaccacctgcggggcagcccgggcgattcgccgccgccgatacctttcgaggacgaaaacacgcccgagctgctgggccggctcaacgtgtacgaggtagcgcgcttttcactgccggcttttgtcaatccgcgtcaccagtattactttcagatgctcattcagcagtacgtgctcagccaatactatataaagaagcatccggacccggagcggatcgatttccgcgacctgcctaccgtctacctggtctcggccatcttccgcgagcgcgaggaaagcgaactgggctgcgagttgctggccggcggtcgcgttttccactgcgaccacatcccgctcctgctcatcgtcacgcccgtggtctttgaccctcagtttacgcgccatgccgtctctaccgtgctagaccgttggagtcgcgacctgtcccgcaagacgaacctaccgatatgggtgccgaactctgcaaacgaatatgttgtgagttcggtaccacgcccggtgagcccctgaaagatgctctgggtcgccaggtgtctctacgctcctacgacaacatccctccgacttcctcctcggacgaaggggaggacgatgacgacggggaggatgacgataacgaggagcggcaacagaagctgcggctctgcggtagtggctgcgggggaaacgacagtagtagcggcagccaccgcgaggccacccacgacggctccaagaaaaacgcggtgcgctcgacgtttcgcgaggacaaggctccgaaaccgagcaagcagtcaaaaaagaaaaagaaaccctcaaaacatcaccaccatcagcaaagctccattatgcaggagacggacgacctagacgaagaggacacctcaatttacctgtccccgcccccggtcccccccgtccaggtggtggctaagcgactgccgcggcccgacacacccaggactccgcgccaaaagaagatttcacaacgtccacccacccccgggacaaaaaagcccgccgcctccttgcccttttaactcataaactttcaggtctcgcgtacgattcgcgagtcgggaatgggacacccgtgggtgtttctccgtgtgtatattattttttttttttgtgtgtgtttgcgcccccgtgtgtctaatgtgctgtttgaaacacgtaaagtagctggtggaagaacagataaacctttaataaaaaaaaaagtatgtgctcccgacccacggtctgcgtgtctcttttttatgtccatgtctccaagtctggtgcgggtggcggcggggttaagcgtcctcgaagtcttcatcatcgtcgtcgtcctcttcttcgcggaggcgacggctttccaagctgtcgtggtgactgagcacagcgacttcttcgccggaggctgtggccagcgcctggtacttgacactgccgctaccgcgtccgcgaaagtagcggacggcgcgacacgtcgtaaacatggcccatatgaaaaagagcatgccgaacgaccagctgatgccggtgcggtattcgttgctgaggaaggtatcgtactgcacgatggggtagatgaggccgcagagtccaaagaaggcgcccaggtggtagccgaattgcaccttgacgtattgaaaaaagacggcctcgatcagtaaaaagtagatgatggagatgatagcgtagaccacgaagacggctaacaccatgtggcctgtacgcacgaaaaagttgtttccgaagccgtagcacagggccatggctaccacggtggtgttgaaaccaagcgctacctctaccaggttgacgatgagcgtgcggaactgcaccgtacctttgagcttggggtgcagacgcgagaagaaaaagagtgagcgtttgtagctgcggtactgcgtgaccatgctcacgttgaaaatggtcaggcagaaaaagtgcacggcggccatgaaggcgatcatgctgggcagccgaaatgacatggtcagtgtgaatagttggaacgtgtccatgctgagaatgaagaggaaggctgtgaggctgtcgcccatgtacgaaatgtcgcgtgtcgactggtttaggctcatgcctttgtccttgcgcatgctgatcttgatccagcataccaggtagtagatggtcacggctaaaaagacgagctgcatgaacacggcgtagcacaccaactgcaccgagtctaagaaaagcataggcgtgtgcaggtgcattacgttgtaggccgacatgttgagcctttcaaagtccacgacgtgatagtagacgcaggggtagcccaggtgcggaaaattgctcagcactagatgcacgctgacgttgacaaaagtcagcaccatgaaaacgatagaagcgctccatgtccgtgtattcaccttatccacgtgcgagggggccatggcgatagcggcggcccgctcgctcgggaggcgatgggggcgcgccgatgacgacaggctcgcgggtcgttaaatactacgatgggagccgccgcggctcacgacgcggtttgagcacgtccgggcggtcggtgaaaaaagaccccgcgggccttcgcgactctcttctgtccgaggatgaccgctcagccgccgctgcaccaccgccaccacccgtacaccctgttcgggaccagctgtcatctcagctggtacggccttctagaggcctcggtgcctatcgtacaatgtctgtttttggatctgggtggcggccgtgccgagccgcggcttcacacgttcgtggtgcgcggtgaccgtctaccgccggctgaggtgcgtgctgtgcatcgcgccagctacgctgcgctggcctcggccgtgactacggacgccgatgagcgtcggcgcggcctagagcagcgtagcgccgtgttggcgcgcgtgttgctagaaggcagcgcgttaatccgcgtgttggcgcgcaccttcacgccggtgcagattcagacggacgctagtggcgtggagattttggaggccgcaccggcactgggcgtggaaaccgcagcgctgtcgaacgcgcttagtcttttccacgtagccaagctagtggtcatcggctcgtatcccgaagtgcacgagccgcgtgtggtcacgcataccgcggaacgcgtctccgaagagtatggcacccacgcgcacaaaaaattgcgtcgcggttactacgcctacgatttggccatgtcgtttcgcgtcggcactcacaagtatgtgctggagcgcgacgacgaggccgtcctggcacgcctctttgaggtgcgcgaggtgtgttttttgcgcacctgtctgcgtctggtcacgcctgtcggtttcgtggccgtggcagtgaccgacgagcagtgttgtttattgctgcagtcggcctggactcacctttacgacgtgcttttccgtggtttcgctgggcagccgccgctacgcgactacctggggccggacctctttgagacgggcgccgcccgttctttcttttttcccggtttcccgcccgtgcccgtctacgcggtccacggtctgcacacgttaatgcgcgagacggcgttggacgcggcggctgaggtgctctcgtggtgcggcctgcccgacatcgtgggctcggccggcaagctggaggtggaaccctgcgcgctctcgctcggcgtgcccgaggatgagtggcaggtcttcggtaccgaggccggcggcggcgccgtgcgtctcaatgccacggcttttcgcgagcgaccggccggcggcgatcgtcgctggctgttgccgccgctgccacgtgacgacggcgacggtgaaaacaacgtcgtggaagtcagcagcagcaccggcggtgcgcacccgccgagcgacgacgccactttcaccgtgcacgttcgcgacgccacgctacatcgagtgctcatcgtggatttggtcgagcgcgtgctggccaagtgtgtacgcgcgcgcgacttcaatccctacgtgcgttatagtcatcgactccacacttatgcggtttgtgaaaagtttattgagaatctgcgttttcgctcgcgacgcgctttctggcagatccagagtctgctgggctacatctccgagcacgttacgtcagcctgcgcttcggccggccttttgtgggttctgtcgcgcggccaccgcgagttttatgtctacgacggctattcgggtcacggacccgtctcggccgaagtgtgcgtgcggactgtggtcgactgttattggcgcaaactttttggcggcgacgatccgggtcccacctgtcgtgttcaagagagcgcgcccggcgtgctgttggtctggggcgacgagcggttggtgggtcccttcaacttcttctacggcaacggcggcgccggtggtagtccgctccacggggtggtgggtggtttcgcggcgggacattgcggtggcgcttgttgcgcgggctgcgtcgtcactcaccgccattctagcggcggcggtggtagtggcgtgggcgacgcggaccacgcgagtggcggcggtctagatgccgctgccgggagtggtcataacggcggtagtgatcgggtttctccctccacgccgcccgcggcgttaggtggctgttgctgcgcagccggtggcgactggctctcggccgtgggtcatgtcctgggccggctgccggcgctgttacgggagcgcgtgagcgtgtccgagctggaagccgtgtaccgcgagatcctctttcgtttcgtggctcgccgcaacgacgtggacttttggttactgcgcttccagcccggtgaaaacgaagtaaggccgcacgctggggtgattgactgcgcgcccttccacggcgtgtgggccgagcagggccagatcatcgtacagtcacgcgatacggcgttggcggccgatatcggctacggcgtctatgtggacaaggcctttgccatgctcacggcttgcgtggaggtctgggcgcgagagttattgtcgtcctccaccgcttccaccaccgcttgttcttcttcttccgttctctcctccgccttgccgtccgtcacttcgtcctcttcgggcacggcgacggtgtctcctccgtcttgttcttcttcgtcggcgacttggctcgaggagcgcgacgagtgggtgcgctcgctggcggttgacgcgcaacacgctgctaagcgggtggcttccgagggcctgcggtttttccggctcaacgcttaacgagtcacgtaggggaactacgtgggtaagtgacgtggatactagtaaaaaaagtgcgtcaaagctcttagcgtgtgacgtggatactagtaaaagggacgtcaaagctcactacgtgttgcgtgttttttttttttctatgatatgcgtgtctagttcgcttctcactcttcctctcctcgttcccagcgcggcggcagcttggggggtgagggcaaattggggtagttggcgttgagcacgtctagcaggcccaggcccacgggccaaccgtccacggtcttgcgctcggtcagcttgaggctgaacgagtgtgcctcgtcctgaccggtaaggcggaaaaagaagcgtgctaccagctgcaggcaggtatgccgcgtctgctggaagagcacgaaggtagcgggcacgtactgcacaatgtgcggctctttttcctcaaagagcaggtagagcgcgctgcagatcagccgcctggcgctgtggtgcagcagccggccgaagctttcgcgcacgttcaccgcgtccaggtactggagcaggtcgtgcaggcacttgcgcgttaagttgcaattttccacgcacgaaataacggtacagagcgcgaagtgcagcaggttgtcggctttgacgatgccgcagcggtgtttgagccgcagatccgagagcctcacctgcgtgacggcgtcttcggtctcgagcaaaaacacggcggagtagcctagaaaggccgaggtgcacagcaactcgctgcggtactcggccatggagaccagcagcccgtgctccgtgtgcagccacagcttgtcgccgcgcaccgtaaagtcgagcacttgcggctccatgatcatcacattctgtctagtgaaatccgtatggacctccagcacgccgcggatcatcagggcctccatttcgaaatcggccgacacgctctgggccgcgccgctcctcgtctgccgtgatcaagcggcgcggcgcggacctttcaagtgttcctgggccgccgctcgaggcagttcccctttctggcactccgcccgccgcttcgcggctcatttggcgccgacgcgccttctcgcggctgcaaatcagctccacgtatcggcaaaacttgctgtcgtcgtaggcggcggccacgatctcgccgaaggagagctgcaggtaggcctcgggtacggggtccagcgtgcccagcgccaggatgtgacacagatagggcagggtcacgcgctctaccgtgtaattggagtagacgatggcctcttcggccccttgatgcgtgaccagacgccgtaggcgaaaggtacggaaatactcgttttcccacaactgcgtgaggaagcgttccagcgactcggtgccgggcacgaactgcgagaagaagctgttggccaccaggcggttgtcttccaccgccagcggacggaagggcgccgcgtcgcgcgccttgcgcacggcctccaacacgggcaggtggtagagttcggcgtcgcgcgcgcccaggctcatggagtcctcgcgccgcgaggcgtagcgcgtgagcaggtcgcgcagttcgcgcacgcgattctcccaggtctggttaagcgtgcgcaggtcctggatctcgtccacctgcgactggatctgctcctccaggcacttgataacctgcttcttaaacaggtcgcggatgtcccgctcgggcgccgccgggccgggtggcggcggcagcagcccgacgtggcccgcgggtcctcccaccacggcgccgccgggtcccaccacgccgggtccgcccggaccacgcgcgggtagtagacggttttggtccaccagcgagggggtcaggtcctgcagaaaggactcgacgctgtcctcgatgccgatgcgcgatttgctgtccgagacgttaagcaaaaacttcataatggactttttggcgtcgctgccccggtcgtgctgctccatcatctccaccagcttcttgcagttgagctcgtggcggctggcggtcaccactttcacaggaaaggtattgagcaactggcagatcttttggtggcggcagagcccgtcgtagcgcagaatctcctcgtgcaggtgtgccaccggcgtggtgaacagcagcttgtcgcgctcataagccagcggttcggccgccacgtacaagcggatgtgcttgccgcgcagctgcgcctccagccgctccgagcgcaccttcttgaagacgcgtacctcgggcgcgttggctacgcgcacggcgcccaggcgctcggccacctgcagcagcagcgccaggttagcctgcagcaggtcctgcgccagcgggtgtgtctcggtggcccgctgcacggccgcgcgtacaaattgcgcccgctcggccgcctcgctcggcttggtcttcacgtccagcagcggtaccagtcccaccgttacgcaccaatccacgtagagaccatagtcgtcgttatcggcgtactgatataaaatgtcgcggaggccgcccagcacgcccgtttgcacgctctggcgcaacgaggcgctccacaccaacagatactgctccaggtcctcttcgtccagcgcgcggtagggaaatagcgccgcgtgcaacttccactcctcggccacgcgccgcaccgtgatggtgtcaaagagcgttttgcacactccgtagagcagctgcttgcgcagcacgcacgggtcgcgcagcacctggtgcatgctttggccgcgacacgtccccagaaagccgtgcagcaaccgcaggaagctcatcgtctgccccgtggggaaaatgtcgatgacggcctcgtcatccacgccgcggcccacgcccaagtacgacgacgccttgatcctcaacctctcgtcggccgccaagatcgaacggatcgtcgacaaggtcaagtccctctcgcgcgagcgctttgcgcccgaggatttttcgttccagtggtttcgctccatcagtcgcgttgaacgaacgacagataacaacccctctgccgcaactaccgccgcggcaacgacgaccgttcactcctccgcctcctcttctgccgccgctgccgcttcgtccgaggccggcggcacgcgcgtgccctgcgtcgaccgttggcccttctttcccttccgcgcgctgctcgtcaccggcacggcgggcgccggcaagacttccagcatccaggtgctggcggccaatctagattgcgtgatcaccggtaccacggtgatcgccgcgcagaacctcagcgcgatcctcaaccgcactcgctcggcgcaggtcaagaccatctaccgcgtcttcggcttcgtcagcaagcacgtgccgctggctgacagcgccgttagccacgagacgctggaacgctaccgcgtgtgcgagccgcacgaggagaccaccatccagcgcctgcagatcaacgatctgctcgcctactggccggtcatcgccgacatcgtggacaaatgcttaaatatgtgggagcgcaaggccgcttcggcctccgccgcggccgcagccgccgcctgcgaggacctctcggagctgtgcgagagcaatatcatcgtcatcgacgagtgcggccttatgctgcgctacatgctgcaggtggtggtgtttttttactacttttacaacgccctgggcgacacgcgactttaccgcgaacgccgcgtgccctgcatcatctgcgtcggttcgcccacgcagaccgaggcgctggagagccgctacgaccactacacgcaaaacaagagcgtgcgcaagggcgttgacgtgctctcggcgctgattcagaacgaggtgctcatcaactactgcgacatcgccgacaactgggtcatgtttattcacaacaagcgttgcaccgacctggactttggcgacctgctcaagtacatggagttcggtatcccgctcaaggaggagcacgtggcctacgtggatcgcttcgtgcggccgcccagctccatccgcaacccctcgtacgccgccgagatgacgcggctttttctctcacacgtcgaggtgcaggcttacttcaagcggctgcacgagcagatccgcctgagcgagcgccaccgtctctttgatctgcccgtctactgcgtggtcaacaaccgcgcgtaccaggagctctgcgagctggccgacccgctgggcgactcgccgcagcccgtcgagctctggttccgccagaacttggcgcgcatcattaactactcgcagtttgtcgaccacaacctctccagcgagatcaccaaggaggcgctgcgccccgcggccgacgtcgttgccaccaacaactcctccgtccaggctcacggagggggaggatctgtaatcgggagcaccggcggcaacgacgagacggcgtttttccaggacgatgataccaccactgcgcccgatagccgtgagacgctgctcaccttgcgcattacctacatcaagggcagttcggtgggagtcaactctaaggtgcgggcctgtgttatcggataccagggcacggtcgaacgtttcgtggacatcttgcaaaaggacacgtttatcgaacgcacgccctgcgagcaggcggcctacgcctactcgttagtttcgggcctgctcttctcggccatgtactacttctacgtgtcgccctacacgaccgaggagatgttgcgtgagctggcgcgcgttgagctgcccgacgtgagttcgctctgcgccgctgccgccgccacggccgccgctcccgcttggagcgggggagagaatccgataaataatcacgtcgacgcggattcttctcagggcggccagagcgtgccggtatctcaacggatggaacatggccaagaggagacccacgacatcccctgcctgtccaaccaccatgacgactcggacgccatcacggacgccgaactcatggatcacaccagtctgtacgcggatcccttttttctcaaatacgtcaagccacctagcctggcgctgctttctttcgaggagacggtgcacatgtacactaccttccgcgacatttttctcaagcgctaccagctcatgcagcgtctcacgggcggtcgcttcgccacgttgccgctcgttacctacaatcgccgtaacgtggtgttcaaggccaactgtcagatcagctcgcagaccggctccttcgtgggcatgctttcgcatgtgtcgccggcgcagacgtacacgctcgagggctacaccagcgacaacgtgctcagtctgcccagtgaccgccaccgcatccaccccgaggtggtgcagcgcggcctttcgcggctggtgctacgcgatgcgcttgggttcctctttgtgctcgacgttaacgtttcgcgcttcgtcgagtcggcgcagggcaagagtctgcacgtgtgcaccaccgtggactacggcctcacttcgcgcacggccatgaccatcgccaagagtcagggcctgtcgctcgagaaggtggccgtggactttggggaccatcccaagaacctcaagatgagccacatctacgtggccatgtcgcgagtcacggaccccgaacacctcatgatgaacgttaacccgttgcgactgccctatgagaagaacaccgctatcaccccctatatctgtcgcgcgctcaaagacaaacgcaccacgcttattttttgacacaacaccgtgtaaggaaaacgtgactttattgagcagggtaaaaaccacgtacaagaaccacgttgtctatccccaaaaaaacacacaccgtcagggaacacatcgcctatagatagcggcactttacataaaaccaccgtacctgcatcacggtggctcgatacactggaaattcaataaaaaccaccgtgtctccgtgacggtacttatcgggtcagcgtcttttgagatttctgttcgtaaacttatccgtttccccggtccgcggtgtctcctcgcgaggctgacagtcgacgggtggtacctgcaagagaagaaacccgggtgggagcgacgccgtcgctgggtatcaaccccgcggctgaccgtcgtccggtaaaggaacaacccgtcgtcgcaagccgggttcgaccaagagaaaaaacccgggtgcggggggagacgggtcgtcctttggttgttcgcggacggcgtacatgccgcgtgggtcagtcgacggcgtcgctccgtgcggtcggtcatcattctgcttcacatatatgggttgtttgtgtttttttttataatgaatacgcactgatcctatccgtgactgcgcgtgtggcagagaggatgccttataacatgtattttgaaaaattgccaacagctataatttctctcatgtagcagaatagagaccttttgtcgtctttttgtttgtcattacttgttttccagggaattagagagagggaaccgcgcctccggcggcggtgcccgcggaccccggccccttctcgcgtgcgcggtgtgactggttgagcgaatgagcagctaggcttggtggtgctccgcgtgcgggggagaagacgattaacaacaaaaaataagtggaagtggccggtgggtctttgtccgcgtgcgcgcccatccgtcgccgggaccgagcagaaagtgatgtggtggtacattgattttttccttgacaggaaagaaaaaaaagagttttgttttcctatgtgagaggagaaaggtatgtgaggagatgttcgatgatcgtatgttacagttatgctgtaaggaagcttttatcgtgcgtcctgtttttcatttgatgtatatgacacaattgaaacctatcgataggcgtatatcgaggattcatcaattcttagaatcgtcgtctttttggctaattggactttgcccatgttggttgtcattcgtggcctgaggtcatcgtcgtccacgacgacgtgtctatagcgtgcggtgtgatcattgtgtcgagccagagaaagcgcgcctcgcacgacgtttgcggatcggctcgcgggtgtgtggaattcctaagaacataatcagctggtcgtctttctttgatgtgttgttgtcgtcgaggtcttgcttcgttttcttttttctttttagtcgatggaacttttcttcggtacgggttcttgttatggaagcttgtgttttcgaacatgaattcgaaaaaataaaaaggcctatcttcgtttcaaaaaaaggacagatatcaatcttcttaacttatatcatggtaaattcagaatcctatggtgtcttattatctctaaagtagtcaacattatggtctaacttgtatttccctgacgagatatatatgatccttataacctggctactatcatgaacaacaatatccttacttacagtcatcttcgtgagttaatgaagtataatatcggtcatctatcaacttatctgctatgtaacgtacccttttaggtattttgcgtttcttaacgagtgtacccgcctgtgtgaggcgaaactctgagaagtctaccgagtcgagttacaagtcactaaaacacttacacgagttatctatactaaaatcactatctatgttgtttgcttacctaattattatcctacatgacgaagctacctcccaacgtaaggtagggggagaggagacagaacaataaaaagtaactaatgtttcttagaacttacccgctaaggacttaccaaactatattcaccaaaaaacaacagctacgtgtttcatttgttttaatctaccgaagtaaaaaaaaaaagatgattagctatccagaacctacttacttcttaatgttttaactaaggatgcctatgggattggaaaaaaaatcacagcaacttgctactaatcagttgacagcgaagagactcataacaaagatttctgggtaatacggttataataatgcttatggactaaaggatacttggaaaaaaagaacgggctatgactatagagattcgtcgagatatcaaacttcaaataggcggctatcattcatggttgtggtgactatatcgtggagaaaaaatgtgatcgttagttagctaggtgagacttacagctatccatccgtctagtttttcgttgtaatgatgatagtacgtctatggtggtgatcgattttggttaacaatttgttcgtttaaaggcttaatgtacttatgctacatgatgtattattctttgattcatcgttcctcctaagggggtgtatgtatgtatgtactagtcgtatagtgttcctaacatcatgactattcagactatggcttcatctatcgtgtctaaagttcacttattctactattactatatatatgcactactatgtaactaggatatggtcctataaggtgtcttctatcacggtggcttgtttatcgcttggcggttacgagcaagagttcatcacggaccagccgtgaggcagggcacacgcgggtcggcggcgatgatgtcccccgcgaaggggacaacgaaaacaagaggccgccggccgcggccacggatgcgtagcggttacacaatgtttggttgagcgttttgtttcatcgtcgtggtggttttgttgttctctgtatatatcgtgtggtggctttatcgtcatcattattatcatcattcttgtttccatcatcacgatgagttttctccgttttcctctcctccagtggtagtcgtgtatcatcatcaatcatcgtagtgacgtcgttgctgctgctgctcttgccttcatggcggtatttctcttcctcccccctaaccccatattaactcgtgagtgtgatggttagagtggctgcttgttttttttttcttttctctttggaacaacaaaagaggataaagatggtcggtgaatgtattattattatcatcattatgatacggtcgcggtcttcttctccgatgacgaaacctgcgcacatcgaagaaaagacgagcgcgcgaaccgatagccgtccgtctgggacgaaggagaagatgatggggagaggaggagagccccagaagccagagcgagaagggagacgacagacatacgtcgtcaccgtcctctggaggaggcacggcggcgctgtttgttgtttggatgcttgattatatcctgttctatggggtagattattatcaataggcttggttttcaaaggtcagcctgtgtattgtcgtgtctttttttttcgttctcatgatcgcggagaccacacagacgtgcgcgtctcccaatggctaggcgttctttttaggtagtaattttttgatcttttttttttcttaacaagtctggcttgatttcttttatctatgatcgattcttctttttctcgggggttgcatcttccgtgaaagtaaagtgacactactctaaatggtaaccatattatctgttgattaggagaaaaaataattttttcgcacgaaatcgatcctaagtgaggtgatttacttgctatcacacgaaatgattatcttttgctgctaacgtactgaattttttaacagaattgcttctccgtaactatttccgcagattcagacagattgtcaaaaaagaatacggcacagaaatagtgggtctgtggcttttggttcgtgtacattcgcgtttgcgtgtcgagatttctacggtatgtttattcttcctgcgatgatgtagggtccttggtgtaagtaggatttcgagtatctctcttagagcgaacaaaataatcaaaaaacaacagctaggaaatcgagggttactctacgataaagtgtctctacaaagtgaagaatgttacgttgtggtggaataataagactcgcgtgatcgatgagtgatcgagagcggctcgaaccttctttaagagctttgtttagtgcaactttaaattacaaggagtagaaagctgaaatgaatctatgaaggtgctattctttgaatatcttactttgtacgcttcacattcgttatttggatagagagttgtctagagaaaatctgtgattctctatgagtgttatttttattatccttttggggactacgatttttcttcttgttctacataccactactactcgtaatcacatacatggacgaaaaaaaaattcgtcaggcagtagataccagattctccgacgttacggcgtcttttttttcttttgagagagtatctgctgagattgtccgtggtgtatctagtcgctatttttgttgttactagtagttttgcacacagtttattcagtatagtttttcttcttgccatgatcaattaagcccaccacctttttttttagagaggaggaatttcgtcttgatctccagccggagacaacggcggtggtggtggtggcgggagagacttcaaggcaatgaaaaaaaaaatttcgttttgccatcaagtggtgacgataacccgtcagattgataattggttcctacagaaactattctaaccgcggaagaaagaaattgaaaaaaaaaattgacaaaaacatcataacataaaggaccacctacctgggacgcgcagttgggcggcggactgggacggcatgctgcggcgatgctgtcggtgatggtctcttcctctctggtcctgatcgtcttttttctaggcgcttccgaggaggcgaagccggcgacgacgacgataaagaatacaaagccgcagtgtcgtccagaggattacgcgaccagattgcaagatctccgcgtcacctttcatcgagtaaaacctacgttggtaggtcacgtaggtacggtttattgcgacggtctttcttttccgcgtgtcgggtgacgtagttttcctcttgtagcaacgtgaggacgactactccgtgtggctcgacggtacggtggtcaaaggctgttggggatgcagcgtcatggactggttgttgaggcggtatctggagatcgtgtttcccgcaggcgaccacgtctatcccggactcaagacggaattgcatagtatgcgctcgacgctagaatccatctacaaagacatgcggcaatgtgtaagtgtctctgtggcggcgctgtccgcacagaggtaacaacgtgttcatagcacgctgttttacttttgtcgggctcccagcctctgttaggttgcggagataagtccgtgattagtcggctgtctcaggaggcggaaaggaaatcggataacggcacgcggaaaggtctcagcgagttggacacgttgtttagccgtctcgaagagtatctgcactcgagaaagtagcgttgcgatttgcagtccgctccggtgtcgttcacccagttactttaataaacgtactgtttaaccacgttgcgtcgtgacgttgtttgtgggtgttgctaggcgggctggaaagatgatgtataaatagagtctgcgacggggttcggcgctctgccggctgcggcggcactcgctccacggcctccgacgagcgttgcgctcgcgctttgcgccgccgcgtcatggatctccctactaccgtcgtgcgaaaatactggacttttgcgaatcctaatcgcatcctgcatcaaagcgtcaatcagactttcgacgtgcgccagttcgtcttcgataccgcgcgtctggtcaactgcgtggacggcgatggcaaggtgctgcacctcaacaagggctggctctgcgctaccattatgcagcacggcgaggcttcggccggcgccaagacgcagcagggcttcatgtctattgacattacgggcgacggggagctgcaggagcacctctttgtacgcggcggtatcgtcttcaacaaatccgtctcctcggtggtgggctccagcggacccaatgagagcgcgctgctcaccatgatttccgagaacggtaatttgcaagtgacttacgtgcggcattacctgaaaaaccacggcgaatcctccagcggaggcggtggttgcggcgccgcgtctaccgcttccgccgtctgcgtgtcctcgctgggtggcagcggcgggactcgcgacggcccttctgcggaggaacagcaacggcgaaggcaggaacagcgtcacgaagaacggcgcaaaaagtcgtcctcgtctgccggtggtggtggaggcggcggcgctggtggtggcggtggcggcggcgggagcggcggtcagcactcctcggactccgccaacggactgctgcgggatccccggttgatgaaccggcagaaggagcggcggccgcctccctcctccgagaacgacggtgagtcccggccctcctcgcgtcacggtgctttccgagtggactcgtgagcctcccgtagcgcacgagcgagcaggcgagcggtgttggtgcgctggtggttgtgtggatgataaccatgtgctttttcgtgcgctatgtgtcgtcccgtctgtaggctctcctcccctccgggaggcgaagagacaaaagaccaccgcacagcacgaaggccatggcggcggcggcaagaacgagacggagcagcagtccggtggtgctggcggtggtggtggcggcggcagcggccgcatgtcgctgccgctggacacgtctgaagcggtggcctttctcaattactcgtcctcatcctccgcggtctcttcttcctccaacaaccaccaccaccatcatcaccaccataacgccgtgacggacgtggccgccggcaccgacggtgcgttacttctacccattgagcgcggagcggtggtttcgtcgccgtcgtcgacgtcgccgtcgtcacttctttcgctccctcgacccagcagcgcccacagcgcgggcgagacggtgcaggagtccgaggcggcggcgacggcggcggctgcggggttaatgatgatgaggaggatgaggagggctccggctgaggcggcggaggcaccaccgcagtcggaggaggagaatgattccaccactccagtctctaactgccgtgttcctccgaattcgcaggaatccgcggcgcctcagcctcctcgcagtccgcgttttgatgacattatacagtcattgaccaaaatgctcaatgattgtaaggagaaaagattgtgcgatctccccctggtttccagcagactcttgccagagacgtcgggcgggactgtcgtcgtcaaccacagcagcgtcgcgaggaccgccgcagctgtctccgcagccggcgttggccccccagcagccgcatgtccgccactcgtcaccaccggtgttgtaccctcaggttccgtcgccggtgtcgcgcccgttgccgccgcaatcgaaacaccagctgctcctccccggcccgtgtgtgaaatcaagccctacgtggtaaaccccgttgtcgccaccgccgcggctgccagtaactcttcctcgtcttcttcggctccactgccgccgccgccaccaccgtcgggcggacgtcggggtcgggcccggaacaatactcgaggaggcggcggtggtggcggtggtagaaacagccggcggcaggctgcatcgtcgtcgtcctcctcctctcggagatcgcgacggagaaacaaccgccacgaggacgaggaggacaacgaccctctgctccggttgtcgcaagttgccggcaacggccgccggcgagggccctcgttcctcgaggacggactcgaaattatcgatcccagcgaggaggctgcgatcgccgccgcctcgatcgcggcgtttttcgacgattaaaaaaccgagccgagaccggaaaaaatatgaaacaggacgcgcttggacatttgggtttccaccccttttggtgtgtgtctatatatattggtcactgattttttttacaataaagagatagacatcacagttcaccaccttgtctccccggtgtgtctattatcatcaatcacccacagagtcgccagtccatggtctctcggtaatgcgtgtccagatacgcgttggccagtataaaatggtcgttgcccacgaaggcgcgggtggtgttgcgcggcgacgggtggcaggacttgagtaccaagtgccgccgtcggtcgatcaggtactcgcaggtgtgcgcgtcggcgccccacagcatgaacaccagatgctcccggcgctctgacagcctccggatcacatggttactcagcgtctgccagcctaagtgacggtgagatccaggctgtccgtgcaccacggtgaacacggtgttgagcagcagcacgccgcgtcgcgcccaggcgtccaggcaacccgaggccggacgctgaaacccgtccaccgtacgcgccagttcgcgaaacacgttgttgagggagggcggcggcggtcggcccgccagcgtgccgaaggccaggccgctggcgctgccgtcgcagtacgggtcctggcccacgatcaccacgcgcacctgctcgggcggacacagatagctccagcggtgtacgtgctcgggtgccgggtacaccatctcgagttgccgcgcgccctccaccgccgccaccgtgtcgcgcagcagcaccgtgtcgtggtcgggcaagctgaggaagcggatccagtcggcgctcagacaaaacacgcgagcctgctcgtcgggggttaacagagagcctttattatcagcaatgttagcgagcatccactgcttgagggccatagcgcgagtgagccggcaggttgacgcgcgtctgcttcagctcgggcggcagtccggcgtagtatttatctaggtggcgtagtagcggcgggtccagctggtgacgcaggcagaattccttcactgcgttgtacaggccgtaaaagagtgtgatgccctcgggcgcggcagcggtgctcacgggcagacgcacggcgcggttggtacgcgtggcttcgttgcgtatggccaccaccacgttaaagagagacggtggcaccagctcgaagcctaacacgtgttccgtgaagatgctgcgcccgtatgacagtcgcgtgaggtcgtagccgcggcacaggtcgtccacgcacgtgtacacggccggcgagccatcgccgcactcgctgtagccgcgcatcaccgtcatccagcgcggcgctgtgtccgagctcaacagcgtcagcagggcccgcaattgatccggattgttgtacagcagggccagagtgtccaggaaagcatcgtccaacagcacggagttggcggcctccggcgtaacgggacggtaacgaataagttgcgatagcgggccatcgcgtctggtaacattcaccaacgggcgcagccaactttcatacttgtcaccctgaaacacctcacccaacaggcatcgacgcgttagttcggggcactccgcggggactttctcggcggcggtaggagcgacgctgacggcgactgaggaaacaatgggcagcagaaggcaacaccacagcagtaccaccggtccaggtgagaaagagaagccgcaatccgggcggcggcacatcaagtctgcggcacgatgagagtgtgacggtaaggagccagttggcgccgaaagttggcgctcaggtcttcgatccctaaaacgttatatattgcatccagcaggtgagccaggctaaacggattcacgtaccaggtttggttacccgcgacgatgacggccagaccgtgggcgctacagttggagaggttcctgggtacgaaggtaactgagtcgatgtcgcgccacggggggaatgagacagacgactggcgcacgctgtaatcacaactgtgattgacgtgtagcgtgtaatttcggttgcactcagcctcgaagtagagggggaaccacagttcgtcgtactcgtcgtcgtcctccagttctggctcttcttcatccaccgcaatgtctacgctgctctgagattcctcttcgtacaggatgattgacaggttatggctacacaggtcctgggcgggaggacgcgtgggagcgcgggtggtggtaatgttttccagatcgtcaaaagtcggagtgtagtctgacgccgtgacgacaccgtcgacggagatggtagaagttgcggccggtgtcacggtggtaagtatggatacagaaggggagggggaagtagcgttcgtaccgatggttgtggtattattattccctgtgtttcttgttccagaaaccgttgacgttgagatgggaatcgacgtggtgctggacgtcagattgctgaccgaggaaaccgtggtgggagtggtgacggtgttactcgtggttgaagtgacgttaggggaggtagtagtggtaccggtggtggcgacggtagtgtttgtcgtggcggcggcagcggtggtactggtaacggtggtcgcgttggtttccaccgcttcacacagtaagcaaaagcacagggccgggaaaagcaaccagccccgccatcgccgccgccgcttcatgaggtgggcaggcgaaagctggtgaattcgttgtacagcggcaagtggggcgccgcgatcgaagggtacgtcaacaagctgacgttgatattaaatacgtctggctgcttttctacgatggaagcgcacagggttacggcgtcaaacaggtctttcttggtggcgcccgagacccacatctggtatacacccgtctcgtggtacgaagtagagcgcggcaccaccggacggatgcagtccagaacgcggttgggatcctggtgaaagaatttgaacgtggctacggcctgtggcgtgtgcggcatcgtctgcgtgatgagctgctggcccgctaacacggtgacgttgtgcaacttgagcagggcactcttgagggcctggaaagcgttgccgcacgaggcgctgatctgcagctgcacggccgtggagtcgtgcagccgcatgagacgtgatacctcttcgaagacgtacttgtatttgctggcaaaaagtggcgcgtaccgacagtcggccggcaaaatgtaggtggcgttaccgccgttggtggccacggcgggcgcagcggccgcggaggccggcgtaaacagcgtcagcggccggtggtggctggtaaggtcgatcatgggcggcgtggtgaccgtggcggtggcgggcatgacggggtttgcggcgacgggcactccggccacagcggcggccgcggcggccacggcggcacttgccgagcccacacccgccggcagtcctccgccacccatgacgccgccgggcagagcgtcgcccagacagacttccgcagtggcgggcgcgctctcagcggtcagtacggtttgccgatcgacctcgcgacgaaagctggtgaggaactcactgtgatccatggccgcagggcccgagatcccgggattctgcgggtgctgaccgagtgcggggcgagttatatggaagacgattagcttggagcggagttttgcgtccctagctgacctgcggatcagcgacgtgccatagggatagactgtgagcggcggccgcaacggcggggtcggccgccgctcgtcgtcacggggcggcgcgagggaggaggaggtggtgggtacgatcttgacgtggttgacgtcctgcccgtccgggggaatacgcaaaaaaccccgtcgcggcgctaccacgatggtgcgatgggtctttctcttgttggccggggccagggacttgcagatgcgtgtggagccgtagacgatctggacgtggtcctgggagaacatgaccatcgccgccaacgctcagcggggggacgtgttgggaacacagaggctgagggaaaactccgtagaagtcagcgaaataaagacaacacagcagccactcctctcgtctcgggccctaccactgcttgaagtagggcaccgggtgtttcttttcctcaacgggctcctccagtctcttataggaccagtcccgccggcgcgccagcatgtaggtcacgtacaaaagaataatcaccatgaacaccaggaaagccagcacgccgtaggccagcagccggtcctcgaacagcgggtcgctcttgataaacacgtaggtggtggtaaaacttcggcccgcaatctgaacgtggagacgcacgacagtatacgtgccgttgaggtagaagacaaactcgcgtaaccgttgtccgttatacgtcacgttactaatattccacggcggaatgagctggttgccctgatgcagatgcacggtgctgttggggtgatagaggctgctaccgttgagcaagcagtgttcgtgttcctgaagcagcacgcggacccgcatcgtggtggcgttcaggcgagtcccgtacacggcgtagatgggataggtgaaaaggtcccaagtggcgttgtgatggcggccccagctgaagaaagagcacgtgtactcagtggtctcctgcggcctgagtcccgagataagcagctcttgagcagtagcgttgtaggagagatgtagttttcctgtggataaaattcataagttgtttattttgttggcaggttggcgggggaggaaaaggggttgaacagaaaggtaggtgctacttaccttcattatcgggggggaaggcgctaagataccccacctgagtgaagggacccttgcagtctgtccgtgcataacaagtaactgataaaatgtctggatttttggtgttattcaacaggataactttgcaggtggcgtttagagacacttggtcgtggctgtagctggcttcgcaattcacagtatacaggtgcccctctttctgcgtcgtggctatcacggaagtggaggcggacgaggtagaggtttgtaccgtggtggtgacagcagaagtgacgttgttagaggtacttattgacgtagtagacgtgacggtggtattactaggggaagtgacggcgcttgtggtgctacttttcacccccgggtgcatgtcgcccaagagcgcaactacgagcgcgatcgccagtacggaacacatgttgccgtgtgacgagacggcgtgtggacgagctatatgtggcaggaggtcgcgtcacctcttgtgacgcctaaacgtccagctccagataaaagaggcgttaataatgaagaccacaaaaaccacttgcgtcagtatgacaatcataaaggctcggtgattgctacgcctaaagtacgcgggattatccaccagttcatcctgctgaacaaagtggatgattgacgtattggtgttactatccgtgttgttgaccatggatttgactaagaaagtcttggcgccaaaagtcccgttagagccccagcaggtgacgctgctattcacataagttcccggtgcccccgctagcatgtatttcagttggtgggtataattttttctgtcgttatccatgtcattgctgtagttgaccttgctggtgagaaagcgtgttttcaacggggcacttatcatcatccctgaggccaaaaagggcgaattgcaagctgtagtgttacaaaaaatagtcaagttagtgtcattgtattgataaatgtaagccatgcttacttcaggctcataccacccgattccaatcgcggccgccatcgttaccacgtcccatcttcccagacttaccaccgccaccactaacagcgtcacccccgcacggtacatagttaccctctcgacgtcgccggctgtcaatgacgtgcctgcgtcagtggctatgatttatagcttttgggcccaaccgcaacggatctgtcgtaatctaccttccacagggccgccgcgacgatgctgaacgacaggatcagacagacggcgtacaaaagtcctaggtcggcgtcgacgcggcaggtgcggatgtctcgcagggtgggtagatgggcgatgcacaactctttctccccccgcccgtacatcccatcttgtatcagcagccgtagcgtggcattgatggtcagcggggtaaccaaagaaatcacatagggatgtgtacaggaagtgcagtgacgggtatccgtgagatgtaagtcaccaccctcctcaccgtcatcatgaaagaccaggactcgggtgagacgacccgatgaatactggatctcccaccacagtctttggtccaacaccgagagggcgcaagagattctaagtctccctgggttgggggagcagatgtaagtcccgtatgtgcctctcgccatcagggccatacacatgagggggagaaggacaattatccgggaccacccgcacccccacatcacgagaccagagacggagatgtataaaaaaagctacttttattaaacagcattctcaccacacgttaatactgtcacggggaatcactatgtacaagagtccatgtctctctttccagtttttcacttactgagacttgttcctcaggtcctggatggctgcctcgatggccaggctcagggtgtccaggtcttcgggaggggtctcggtgggctgctcaaactgccccacggcgtaggccttcgcggccgtctcgtagataggcagcatgaacccaccctggttggtggagaagatgcgcaccatgacctgtttgggaaacttttgcatcaggggcaggcacaggttgagagcgcccaacaggtccacgggggtggcagcgtggatgatcatgttgcggtaatcggaggaacgggggcataattggtgggtgtgcaattctttgaggctccacgcggccttgacgccttcgttacaagcatcggctgtgcgctgcgccacttcgggtggatgtgtcacgggcatggtgtgctccatgaggaagggagtggagagggccaggttgcacatggtgcccaggcgacaccgcaccgcatccacctcactcttcacctcatgattgcgggtgtagataatctggatgcccttgttgttcacctgcatggttttgcaggctttgatggcctcatctaacacctggtgcatactgggaatcgtgaagggcaggttcttgtactcaagagagcgattggtgttgcggaacatgcggctcacctcgtcaatcttgacgcgaccccgccgagtctgcacgttgggtgtgcagaagggggtgttcttatctttcatgatattgcgcaccttctcgttgtccaactcggagatgcgtttgctcttcttcttgcggggtccggtgctcgccccgccgctgctctgatggccgcagctcagcagagaggaggaggccgcgccaccaaaaccgccgcgcccatggtggctcgaggtcacggatgctcctccgccactgctgcatttcatctcctcggactcactctccgagtccgaagccgaactgcaggaggaggaagacgaagaggaactatcttcatcgggccggcccaagggatcgggaagaggagggtggttcatctgggagagcgggtgcgtgggagaggtcactcgcggcgtgccgctgccggtggaaggggaagacgcggtagcaccgcgggtttcgacttcttcaccctgttcttcctcgctatcagagatcacgatacagccggcggtatcgataatcttgttgcggtactggatggtaaagtcgggctcgggcttgatgtcttcctgtttgatgaggggcagcatgataggcgcgggaggcacgggcggtttaataatcaccttgaaaggacgcgtggttttgcgcggtttcttacgcgggctgagctcgggagtagcggatgccccggggagaggagtgttagtaaccgcgacgctggtgggggtcggcttgttaagaggggcgctgctaacgctgcaagagtgggttgtcagcgtggggccggtgctactggaatcgataccggcatgattgacagcctgggcgaggatgtcacctgatggtgataagaagacacgggagacttagtacggtttcacaggcgtgacacgtttattgagtaggattacagagtataacatagagtataatatagagtatacaatagtgacgtgggatccataacagtaactgatatatatatacaatagtttactggtcagccttgcttctagtcaccatagggtgggtgctcttgcctccagaggcggtgggttcctcagcaccatcctcctcttcctctggggcaacttcctctatctcagacactggctcagacttgacagacacagtgtcctcccgctcctcctgagcaccctcctcctcttcctcatcactctgctcactttcttcctgatcactgttctcagccacaattactgaggacagagggatagtcgcgggtacaggggactctgggggtgacaccagagaatcagaggagctgacaccagcggtggccaaagtgtaggctacaatagcctcttcctcatctgactcctcggcgatggcccgtaggtcatccacactaggagagcagactctcagaggatcggcccccagaatgtactgggcaaagaccttcatgcagatctcctcaatgcggcgcttcattacactgataacctcaggcttggttatcagaggccgcttggccagcatcacactagtctcctctaagacatagcagcacagcacccgacagaactcacttaagagagagatgcccccgtacatggtcatcatacaagcgtcactagtgaccttgtactcattacacattgtttccacacatgtagtgaggatatccataaatatgtgatcaatgtgcgtgagcaccttgtctctctcctcatccaaaatcttaaatattttctgggcataagccataatctcatcaggggagcactgaggcaagttctgcagtgccgccatggcctgactgcagccattggtggtcttagggaaggctgagttcttggtaaagaactctatattcctgtagcacatatacatcatctttctcctaagttcatcctttttagcacgggccttagcctgcagtgcaccccccaacttgttagcggcgcccttgctcacatcatgcagctccttaatacaagccatccacatctcccgcttatcctcaggtacaatgtagttctcatacatgctctgcatagttagcccaatacacttcatctcctcgaaaggctcatgaaccttatctaagatatctaaggcattctgcaaacatcctcccatcatattaaaggcgccagtgaatttctcttccgtctgggtatattttttcagcatgtgctccttgattctatgccgcaccatgtccactcgaaccttaatctgtttgactgtagaggaggataacaacacatataagtatccgtcctcctgactcatttatcgctatctcgatgccccgctcacatgcaagagttaatctttactctatctgacatacacaagtaaatccacgtcccatgcaggttagtatacatcacatacatgtcaacagacttaccgagttctgccaggacatctttctcggggttctcgttgcaatcctcggtcacttgttcaaaagttttgagggattcttcggccaactctggaaacagcgggtctcccagactcagctgactgttaacctccttcctcaacatagtctgcaggaacgtcgtggccttggtcacgggtgtctcgggcctaaacacatgagaaatagagtcataagcacatgggtcacatacaggagatatgtatataacattaatacaattttattaaaaaaaaagggggggcacaaaccccgacacgtaccgtggcaccttggaggaagggccctcgtcaggattatcagggtccatctttctcttggcagaggactccatcgtgtcaaggacggtgactgcagaaaagacccatggaaaggaacagtctgttagtctgtcagctattatgtctggtggcgcgcgcggcagcaacgagtactgctcagactacactgccctccaccgttaacagcaccgcaacgggagttacctctgactcttatcagaacacaacaactcagctgcctgcatcttcttctgccgctgccttaagtcttccaaatgcgtcagcggtgcaagcccgctccccgagctcattttcagacacataccctaccgccacggccttgtgcggcacactggtggtggtgggcatcgtgctgtgcctaagtctggcctccactgttaggagcaaggagctgccgagcgaccatgagtcgctggaggcatgggagcagggctcggatgtagaagctccgccgctaccggagaagagcccatgtccggaacacgtacccgagattcgcgtggagatcccacgttatgtttaataaaaactgcgggcactggggacggtggtgttgtatatgtgaatttgtaaataataaatgagaccccatcctgtaaaaatacagagtccgtgtcagtctctgaaggacagtgtattggcatatagccaataaagagagttgtggcaaagagccatgttatggattagtaatggaaagtatcgtcaccaataggggagtggtcaataatggtcaataacccacacctataggctaagctataccatcacctataacatgaggaagcgggggtgtatagaccccaagccaaaaacagtatagcatgcataagaagccaagggggtgggcctatagactctataggcggtacttacgtcactcttggcacggggaatccgcgttccaatgcaccgttcccggccgcggaggctggatcggtcccggtgtcttctatggaggtcaaaacagcgtggatggcgtctccaggcgatctgacggttcactaaacgagctctgcttatatagacctcccaccgtacacgcctaccgcccatttgcgtcaatggggcggagttgttacgacattttggaaagtcccgttgattttggtgccaaaacaaactcccattgacgtcaatggggtggagacttggaaatccccgtgagtcaaaccgctatccacgcccattgatgtactgccaaaaccgcatcaccatggtaatagcgatgactaatacgtagatgtactgccaagtaggaaagtcccataaggtcatgtactgggcataatgccaggcgggccatttaccgtcattgacgtcaatagggggcgtacttggcatatgatacacttgatgtactgccaagtgggcagtttaccgtaaatactccacccattgacgtcaatggaaagtccctattggcgttactatgggaacatacgtcattattgacgtcaatgggcgggggtcgttgggcggtcagccaggcgggccatttaccgtaagttatgtaacgcggaactccatatatgggctatgaactaatgaccccgtaattgattactattaataactagtcaataatcaatgtcaacatggcggtaatgttggacatgagccaatataaatgtacatattatgatatggatacaacgtatgcaatggccaatagccaatattgatttatgctatataaccaatgaataatatggctaatggccaatattgattcaatgtatagatcgatatgcattggccatgtgccagcttgatgtcgcctctatcggcgatatagcctcatatcgtctgtcacctatatcgaaactgcgatatttgcgacacacagaatcgcccaagtcaccaaagtcgtctatcgccatcccccgtaaacgatataagcgctatcgccagatatcgcgtatgcccaaaaatcacttttggaaaaatggcgatatcagttacacagaaactcacatcggcgacattttcaatatgccatattttcaaatatcgatttttccaatatcgccatctctatcggcgataaacaccactatcgcgcgacatgaatttagtcggcgacagaaatctcaaaacgcgtatttcggacaaacacacattttattattcactgcagcatatagcccattttagcgcggcacacatccagccgtttgtgttttttaacgctctccaggtactgatccaggcccacgatccgggttatcttgtcgtattccaggttgatccatcgatagggaacgctgccagcggcgcccagcaggtactgcgccttgtcgttcactttgccgcagcgtattcgcccgtcagcttcgaggtataacctacaacacggaggggaagggggggtacaaaacgtgaaattagactttttttttaatgatgttttgtccctctgtcttactttcccataggctgtaaggccctcgaggaagagacttacggattgtagttgcagctcgtcagtttgttgtgtacgacctggcgtgtcaatgaatgggtcatggtggtgacgatcccgcgaatctcagccgttttctcgggactgtagcagacttcgccgtccggacaccgcagcctgtggattcatgaaaatctactctggcattcccgaggatcgtcgatggaacatggctatcagaaacgtcgagagacaaatccagacgcaccacagaacgcagacaatcataaaaatacgtacgcgacggtgaagcgattgcacattttgaaatcgtaacagcgttccggcgggtggttgacgtttatgaattcgcaacattcttctgcgcgcacccgcggcacgcggctgtgacccaatagcagccacaacgtcgtcaagaacggcgtcaggtctttgggactcatgacgcgcggttttcaaaattccctgcgcgcgcgacgggctcaaacgatgagattgggatgggtacagaaggtgtaagtctggttattggcctcggtgaacgtcaatcgcacctgaaaagacacgctgtagtcccggaagacgtgggcccagctctccagcttcatcacacacatctgataacgcgtgccatcgttgacgacgaagcgtagcagcttggtctgcttgggcaccatgtgcgctccaaaaatcttggcgtcttccacgctgatctgcacgtttccgtcgctcggtttcgaagccgtttggggcatccgttggaggatggtctggttgcgaccgctcagataccagatcacctttttcacccaggtggagcttctctccaccaaggtctggccttcccggttgtacagcagatacagggtctcgttgcgacactcgggacccgttgatacctgctggaaccccgagaattgcaagggggaccgtgggggcgagggatagagaaaaggacagtaaaacgtcgccgcgtcatgcggtttggaatacgtcagtttagaccatggcggggacggattctggtttgccgttagcgtcgaccacggagacgccagacagggcgttgcccaaaccgcgcacagaagcaggcagtgaaagtggtgacgaagcagaagccgcagcatattatttcccgtgacgcaggctagttggcaaagagccgcacgctgaactcgaggctccgggcgtgtggcgccagcgaaccggcggcgttgaacgtggtccttttgttggtgccgccgcgacggttctgacgtctaaagtcgctgatgagcaacgacacctcggtcacgttgattctgcaagcacaggttccaaacgtcatttcataccccatgcggttacttagccgttacccgttcgcccttaccttcccgttgtcatgcacctttagcgcgtaccctcacctcttgagcacgtcaaagttgtccaagccgtggctcgcatcgtagtggtagttcaacgtgaggtccacgagctgttccacatacttgtaacgggtttggtcgggcagcgcgcgagagcacgcgtcccagtaatgcggtactcggtaataatcgttttttttccgcggtttcccgctggcactgacccagcaccacggcgcacagacaaacagacagccacacccgacacagccgcatgttgcagactgagaaagaaagctttattatgagacatcatacacatagtataggcgaggtgatggggcggggaaagagttggaaccgaaagacaaaaaaaaaagcctagtcgtactcgggatctctgagcgagacgggttgcatggcaactttcattagtttgggaatctgccagctggtgctgttcgaaggttcttccatttccgaggcggtcagttcatcgtacaccgaaacgtagtacctgatggggtcctcctcattgtccgagaggtgagattcgatggtcaaaggcgagcctctcccataattgggattcacgaacgacgtgtccaagttgccatcctttctgaaatagatgacgttctcaggatcatgtttcatgcgctcgcgggccgcggacgcctcctcctcctcgtcccagtcccgagtttccaaccgctgataagggctcgaggaacaaaatccggcggggatctgagaacctcgtcgggaaccgctgccaaacgggctgctgccgccactgtcgtccgtgtcgtccaacaggttgacggcctcttcgtcggcgaaacgaaagcggcccgggtgcttgcaacacgaggagtaaactaccgcgatcagtaccgctatgaagctgaaaatggaggtgcctgtcacgatgtagaagaggatagccagcactttcatgatttcgtcattgcgcgcgtcgtgaacggaagattcgcgggcagtggtcatgttggtttcggttgtaggttcgctactcgtggtgctctcgacggtatttctgctgctggtgctagtagggacgtttgtgctgctggtcatatttgtagcgtcgctgaagtcgatgtgaagcagcaacccgaacgcgaccaggaccaggaatgttgcgcgaaggagaccccgcggggccggcattcttgagacgtggcgacgtggatttcttgttatgtccgcgaacgacgtgtaacgaggacgtggtttccgcaagcctctaccgacgccgcgacaccaggtaggttatcaaaacgcgagcccatatcgccgccatcattgtaatcagcaatgtgttgaggtactgcacgatgaatctgtctagtgacaccagccaaccctctgcttttgcgggcaagcgcgctttcggtgacagggtgtatcgtacgtagccgcgggtcaggcgcgcgttgtagcggtacacgcagaaatctatccacaggccaacgcccggctgtagcttcggatggtggataatagcgcggtgacgtacgccgcgtggctttagaatctccacctgtaaggccatctcctccaggtagtgggtctgactgcgacgcagcgtccagttcatgtaaaagtcggtctcgccgtgtccggccacgaagaggctgcttactaatccagtctacattgtgccatttctcagtctgattgcattttttagagttatgttgccaccaacgtatcctgttacgttgattacctcgtaactgcggtcgcatcttttatggactgtataattgaaaccatcacaagtaacggtcgtggtggtgttggtacatgtggtagtctcaacgtttgtatttgtcgttgtggatatctgtgtggttgttttcgacggttttgtagaaacggtggttgctggtgcagttgcagtagagcaatttatagattctgaagtgcttttattgctgataactgttgtactgtatgttgatgtggctgtctcagtactagtggaatagttaacggtagtactacagggacattgacaggaacaggtttgattgcagctttctgataacgcggatattagtatcgtccacataaccgtaaatcgccagtccattgcaatattagttctcgctcaatgggcattaatattcctttgaacgctgagccttacagaatgttttagtttattgttcagcttcataagatgtctgcccggaaacgtagctcaatcttcatgttctgtgtgatatcgaacaatgaattctgattcactgacggtgtcttgcaacatatggtactttttgttaaaggctcgtcgtgcaaaaaacagaactatgcaggccatacaaaccaacacgatggtccatacggtgcggcttctttgcgagctatgatagagattacgtttgtggtgatgtgtattgttagtatgttgacttcctttctctctatcttcattttcgatatcggtgttgtatctagggcaaacgaaagtagcattaatagcttcagtatgattttttggtgttactaataggtagaaattttcatcttcgtgatgtcctgtgaagtaattttctttaaaacaacgtctgctgtacctgccggaattggtgatatttagatcgtacagatgtagttctgtgttgttgcacgaacgacataagtcatggtacagtgaaggtctttcatgttgagaatgacatacagtatgagaggtaaggatgcgtaaccaataccaagattgggtatgtgcgttcttacgatgacctagatgatgtccgtgtgtggatcgattgtaatgtcgtatccaggcgactgaaagacaatcccacgtagaattaccttttatggtgacattactcccttctattcctgttgtattagtttctttgaaacgtatgattgttgtctctgtgtgacaagcgttggaagagttagtacggttgtacgtggtgtacgttgtggcgctgcaatttgtaagccatggcgtgcttataagtgcagtattagtggatacgttgtgcgaagtttcatctgacgtgatagttacggtgattgttgtgttataagatgatgtagcgtttgctgttacgttggtaaaagataatatagtgttggtatttgttgaaatcaattctgtagtggcagccgtattggatatattagcatatgatgtattgaatgtagaatatacggttgtgaaagtactcaagtcggaggtaacgttggtgatgttgccaatggttgacgcttgtgaggtgacagatgtgtgtggcgtcgttgatgtgttgttattcggagtagaaaatacgctggtcacaaaggtggtagaagcagtgttgggtgatgtgatggatgcagtattggtagtagtactgttgcatgtaactctatgcagaatatagaatattatgattgtatacgccgtatgcctgtacgtgagatggtgaggtcttcggcaggcgacacgcatcttttactgtaaatccccgtccaccgtcaacaacaaaggttccgtatctaggtccgtccgcagatgttcagcgtcctgttccccgattcgttgcgatcgcaggaagcagatgaccagcgcgccaacaaagatcatcattcccgaaacccaggcgcaatggagtgagaggccggaccactggcgttttaaatccgagataattgcccggtctgcctcttgggaatccgtaaccacaactctccctggtcccggataaaagcatcgacgcgtttccaaggctcggcagaagctacgtgggtggatgatgaggtagaaagcctcgacatcgccggtatactgatcctgcaggaggtagactcccgtatctttaaccgtgagattgtacagcgtcagattttggcgcgtgcacgcgaacgccgcaccgccctgacgcgtggtttctttataggcgtctgtaatgatacaaagtggcggcatacgacgcatgtatctgctgtagatatcataacgctgccagactacgctgtgatggctagtgttaagcctggtaaccagcgtgcgtgtacggtcctcgcaggtggcacggtagttggcgagctttaggggttttttggttggttcgacggcgttcgatgaacttccctgagttgtgaacaaaaacagcgacgtgactatgacaagcgtgaggggggtgctgtaggtctgcatggtgcaaaacacgttctcgccttccttatcagacgttgtcgtcctcgtcctcttcgtcgtctgtgcccgtcggttcgatcaacggggagttatctttctgtctggagggtcggtatggaatccgttcgtagatgttctgctttttagccgcgtgttgttccagctttttgcgtgtcaggctccgataggccagacattgatctacctcggtgcccgtgttgtttttctcctcctcgcgcgcgtaaattacaaagaagaccaccagcaggactatcagcgtagccacgaacgagcccgcgccccaggccgagtatgcgcctagcatggtaatgggttctgtgatccggcatttgcacatcgcgtggcacttgctgccattgccggtattagatgatgtgttattcggactgcacttgcacgtcaaatgggtattttctgatttcacgagacagttggtggcgactttggtttcggcgcagacggccacatagcttaccaagctgagtgccagaaagcacaccgcgtgcattacacgcggatacatattaaaacaccgtgttccacaagcaccgcacacgtcaatcctccccgcacggtcttcagcccgcccatgacatgatctccctcacgttacccttcaacaccctgtagtactctgtctcggcttccggtccccatgtcctaattataacaaaacaccgtgacactgtccatctccctgtctttttgcgccgccggtcccccccaaatcatgtctctagatgccgccggccaccaaccggaggcacggcggctattggattcggcattggtgcgccgcgtcttggcctgcatgatcatcgtcatcatgattgccattagcatctggatcctgacctacgtgctgtttctctaataagaaccccggcccctgacggtaattttcctttcttctccgtttctcctcagctgccgtacgtgatgcctcacggccatctccgacaggccctctccccgacctcctggacatgtgagggcttgttgctcctcctgggattgctggtgctcttctttcaccaccacaaccagtcggccgtggagaggcgtcgccgcgtctcgttcgtcgaggccgatcgactgccgcatgagagcgggtggtattcttccgatgacgacggagaccgggacggtgatgaggaaactggagagagccacaacagaaacagcgtgggactgtccgctgtttttagctgactggcgtgcgacctgtaaaccgttactcgggtctcaagatggtttggaagttgtgactcatcttcctgtgggtgatacccaaccggacgcgagtgttccataaaagccgggcgctccggcgagaccatgccatcctcgccttcggacgccccgctcctcttctctctcctctcctccccgctgccgcggccattgccgccgccgcccataccatcggcatgtcggccgacaaatcgcagctgtcttcgccgccgcagctgtagcagttaacgtcgccggcctccaggaggagatggcgctgtgcgtcgtctcttcgtcccgtctccctctgtggtcgtgggtggtgcgagagtacacgatgggtggctctcgtctcgggggaccacagggggaggggggtaatttattattcgtattactgtaattttgtatcgcttaatttgtttagagccgcacgcttgacaacgccttgtatagccttatttatcccgatgacttttttctccgtacaagaaatggacgtcacttgagcagacacagtttcatcgaccacgacagtctcatgatctgactacctctgacccgccaacgagaaaaccgaaaagtaaaagatgaccgcgccctcggagtccttttttccttttcaatcatgaaagcaagaggcagccgagagaatgccagtaagagacgaccatcgcagacacagtacgatactcatcttagaacgaaccagcgaataaccatcacacgtacagcagaatctcatgaactagtcaaccaacgtcataaaatcttcacacaatcgtttttgcgaacttttaggaaccagcaagtcaacaaaagactaacaaagaaaaaccatcttggaattaaaaaaagtagcatcgttaccttatgaaccagcagcattcagtatatacaccagatataatatatttattaatgtatcctctctttctcctgatgtaattttgtttttgtaaattcaattgttgaaagtctctccctgggggaattgcatatcttattgatgaagaagaaatccctgccatatgtgttgtcaaactatcattatttctctatatgggtattttttttctaagaagcaaaagactagcagcagccaaaataaacctgatgaaatctttaactgaactcccagtggtctgtgtgtatatttctgttggtggtcggttgtctgaacccgggtgggttgttcggaaacggcgggacggggaaacggatggaaacagcgtcgctatatacgtgacttttgatctaaacggacgtcgctaggctgacagtttacgaattgctaaacaagataggaacaaaacaagcggggctttgcctggtaggatttcctgtggaaacaataaccggatgtgattgtggctggtacataagctggttctggctgcaagcgcttttcactgcattaggtttggcgtttgcttttgcctgggaacgctatggctataacgggaaagaaccggtttggcaacattccattgtggggggggggtacttatagcgtgcctagctatgacgttgatatatgtggatgcggataatactcgtaatgagctaaaagcgacgactggtagtaattttaccattacgcataggaaagatccgttgacaactaagtggaaaaccgtttttggtaacaatggtgatcagtggttgtgcaacgttacgggtataggtaatgctactgtgaatagtaacgcaactatttgtgtgtcgagctgtggtcataatacgttggatttatgtaatttaaagtcgggagattctggcttcttcgatctgtctcgttggttcggtgaaaacatggatgaatacagtggtgatgtgtggcacttggaagtcagctaaatgttgtatcgcttagtgaattggtgttcttacagttttcatgtaataaactacgtgtaattcgttaaatttgtgtgtttttttgttagtattctgcgtaacggtggaataaaattgcgttgacctagttagatttcctgtgtagaacaatgaccggacgtgcttggactggtacatacgcaggggctggacgtggttaccggtcactggactcggtttcgctgtagctgtggttcaacctgaacatggctcccagagctgctaggaaccggtccagtcacattttttggtgggtggggggtactaaaaaagtgtttaatatttgggtttaatgataaaatccaggttatggatatgaggaaactgaatacctcgcagggtcgaaatcttaccacagttgatgatagaagacggttttccatcgggtgggaaacatgggataacggtggtgactaataatggtacaacggtcgtcaatacaacagcctgtgtttcaagttgttcgcatacgtcgcttgtgctttgcaatatgacgcagcagactgattcgttgtacggagtgggtcatcggttgaatgacgaagaagatggtgaactgtggagagtttcggtttcttaataatcccatacgacatgtgttcatttatatctgaattttaggatgatgactatagtataactctggggaacaaatatcatacgttaatcactttaagttacgccgttaggaaaagaaaatcagtccgaatgaagcatagtcagccgaatgatacagcaatagcttgtttacaacgtgttcttttttacattatgaacgtgccttgctttttatacacacatggagacagaggtccctcagcccttgtcacgacaactccctttttctaaaccgtatgtgctccaaaccgtatctcctcatcgtcacgtgaaataccatgggaccccttttcgtcacacacgtctttccgcttacccaacgcgtcagcccgcgctcggcagagctaccatataaaaacgcaggggtttagcagcttccccagatcgctgctgccccggcgttctccagaagccccggcgggcgaatcggccggctggtcggtcggcgctcggacggatggggagaacggcggtgacttagccgcccgtggccgggagaagacggaggagccgagatgacaacagcagtcgtggaagggtcgccaagccccggtccttctcttctgtctggtcgaatcttgttttcttttttcaaccgctctttttgtcacctttttatgtgagtttctcttccgcgtctcccggccgtaccatccacccatgcagcatgcacgcgtgtatgtatgcatcgcctctcctccgtcccgactaccatcagcagtaccactgccgccacccccagcgccaccaccgctgccgtcgccaccgcgttatccgttcctcgtaggctggtcctggggaacgggtcggcggccggtcggcttctgttttattatttttttttattttttatcttctcctttccttaatctcggattatcatttccctctcctacctaccacgaatcgcagatgataaacaagagggtaaaaagaaaaaagctacagacatttgggtacctcagctttccgataactcgaagaattcaaagtcgacgattcccaacaagagaaaacagaacaaaaacaaggtcatttttatttatcctcatcgtcaacaacaactaccgacaacaacgaaacaccaccaagaatgtcaatccgcaagggtgttcctgccccctcgacgcgcctgtcgcgatcctcatggcgaggaccgcgatctccgtataggtagatgaaattatcccgtgtccggtcctgattccccgcatgccctgcacatcctgacgcgtcggtcagcagccaaacaatcataggaaatgaaccagaagaacaaaaagatcatctctctcggtgtatagcaacaccaacaacaaccgcatcgcaacatcttcatccgcaagacggaaagaaaacaacaataatgagaatgaaatcaccacaaccaagccagatttcacgtccatgagtttttattatattattatcaaaacgaaaaacagaaaaactgtcatagataaatataaaaaaaaatagaaaccacaaacgactactagtactccaatcttagatgtatatgctcctagataagatttagtattaccataatcatcgaagaatgaaagacgacgatgattccttaccgctcctgccacccggtctgtatgtagagagagaagagagaaaacggtgaatccaagatccccgggtcggcgtcggcatgccgctgatcgcagtggccccacctcggcatgccggcgccgggcgaggaattgctcatgaaaaaaagtatctttctgtaaaaaaagaaaacaatacatgattaaccgaaaagaaaccaacaaaaagaacccgagatcagtcgatttcgatcactacgataaacacatggaagatttcttgaaaaaagaaaagagaaagagaccaccttcccggcggcggacacgctcctctccgtcgccgttctgcaccatgattcgatcaataacaacatcatcatcggagaccatcttttaatcaatcagcgttgcagtagtcgactccctggacacgaaggagtcatccatttttatcctcgcacttcttcgctctcaaagccgcctttaaagttgaaatgaaaggatggaaacatggaatacagttttaattgcacgtatcaccattttactacaaaaagaaaaaaaaacaacttacacatagtattaccttaggtttacggataagtagagtgtaggcgtttttgaaacagttcagccaatgcaatcttgtctcggcataatcactctttctgcatataatagtagtagtagatttattcacatcaacacagcgaaaaactccagcatcaaagtacacctagagacagcccttaaaatatagtttgcagcttttagatgtacttacaccaaagaagattaccgtccttacgagaaaacagatactcggatataggaatcaagacagctctgcactgaaaacacactctcctgtcacgacaccgcgccacaccagaggcgtacgcgtgacttcatcgcaacgatccatcgtgatgtccctcgcagaacctaaaaagaccaaaaaaaaatcttggaccacagttgtcgatacttgaagacaatattctcgtgagaactttgagattcgcacttgaaacctcttaggatccacaaaaacaacaacctctgtatggaaaatgcgctattttatctcagcttttctcccaaacctcggtttcttcctattcttatgttttccctagtatatttgcctccttataagaaaagaagcacaagctcggtcgcacggattattccttctgctaatctattattttgttccttttttttttctttgccttcaccctcttcactccctgtagcaacacagagtagtagacacaataaatgagaagtttgcatgcatttgtcgtgtccgtggtttgttatggcgtgtggagtgctcgggatgggtggacgtggggacggattcttgaggctacaaagatacgcggagacgtcgtggcgaggggatgggtttattggatatcggtgaagcagcgtggcggcgaaagacgcgatccctgggctggtagatccccctaccccgtctaccagggacgtttatcctttggacacgtaaatgtctcggccggcatccacgcgccacgttcaccgcgttgtgcccagcgccatgtgcgggtcgtttcggcgtgaagttggacggcgtagtttcggggattgtgaaccgtggctgagggtgtagatgggacaggaaaaagcgtgtgatctgaccgaggcgaagcatgtgggtggtgcgatgcggtggatgtggcggggtgcggcggtttccgacgtggagatgtggagatgggggtgatccggatgcgtggcaagaggcctcgagcttgggcttctcccgcggatggacgttctaactgtacacggcggccgtggcctccgagtaaaaaaaccaggtgctgacgccagacagagacgccgtcctcggaatcgtgtgcgcgaaagcctgtgccgcggcagcgtacgacgttccagtcagcgaggccgtcgcgttggcgcgccaacagtaaggtgacgacaggttggcggcccatggttccgaagcgtccccacatgcaccagcagtcggcgtcaaagtcgcttgcgctgtcggcccagtcgccaccgccgcggcggatttccgcgcgggggacggggtagccgagtgctgcgccctcgccaatgttgtgaagtggatgcgtgagttgatgttgattctctgtgggaaaatgagcgctgtcctgtgggttggtgttggggtatgcgagtagtaggggttgtgtttgatcgtagaggtgttggcgggcctgtgcgcaagcagcgtagtctgcggcgtcgagctccatctgtgtgcggtgttcttcgtcggcgtgtttgtccgaggtttggacatgcggttgtgtgttgctgtggtgtaagggtaacgtgtgttgggcgtctgggtgaagcggcgtggtgtgggtgctgtttgtgtctgtggctggcatgattgtgcggcatgtgtgtgttgtagtgggtggaggttaaataggtgaggtgggttccctggtccgcgccgcaaactgtccccgtccccaacgtaacctcccctacgcggcgcgaacagccccggccccagcgcaacccccgtccccggccccaacaccgtcccgcacaccccccgtctccgcaacaccccggcatcgccggcggccagaacgctcgaaaacccccgacaagcgcagcgccgaaacgacacaggcaaggaccgtggaacgcaccggcagcgcgccgaaacaccgtcccgaagcccggtgccgacaacaaataccgtgggacgacacgcaccggcagtgcgcaggcagcgtcggacacaacacgcttacggccctcaacactccctcgaggacccaccacgcggccccgcaccggcggtgttttgggtgtgtcggggcgcggccgggtgggtgtgtgccgggtgtgtcgcgggcgtgtgttgggtgtgtcgggggtgtgttggcagggtgtgtcagggtgtgtcgcgggcgtgtgccgggtgtgtcgtgccgggtgtgtcgcgggcgtgtggcgggtgtgccggcggggtgtggtggcggggtgtgtcggcggtgtgcgcggcctcggggtgtgcggcttcgcaggaacgagtgtgtggcctcgcggccgttatttcccccgcggtccccagggccgtcgtccctcgcccccgggcgttgcttttcgtgtgtccccagggacccatgctgccgtcccccgggaacttcctcttttccccggggaatcacacagacacagacacgcgtcttcttttcgccgtgcgcgccgcacgtcgcttttattcgccgtcgccgtcctccgcaccacacgcaactagtcgccgtccacacacgcaactccaagtttcacccccccgctaaaaacacccccccgcccctcgaggacccaccacgcggcccggaatggatgtcgggcgtccacctagatgggtgcgcgcccgggaggcggctgtgcgctccagtggtacgcgcctgccgcgcgtcttccttcgggtagctgcctttcccagtccacggccttccagactgcgtggcgccaaggcggcgccagcacgcgccgtgcacgtcgctgcctataaaagccagctgcgtgtcgcccgcggcacacgggcgacgaaggcgtccgcgtgtctaaaccgcgtgctcgctgacgcgggtttgcttcctatatagtggacgtcggaggtgtccggcgcccatggcccagcgcaacggcatgtcgccgcgccccccgccccttggtcgcggccgcggggccggagggccttcgggggttggttcctctcctccttcttcttgtgtgccgatgggagcgccgtcaacagcgggcactggtgcgagtgctgcggctacgacgacgccgggccacggcgtccaccgggtagaaccccgcgggccgccgggcgcccctccgagtagcggcaacaatagcaacttttggcacggcccggagcgcctgttgctgtctcagattccggtggagcgccaggcgctgacggagctggaataccaggccatgggcgccgtgtggcgcgcggcgtttttggccaacagcacgggccgcgccatgcgcaagtggtcgcagcgcgacgcgggcacgctgctgccgctcggacggccgtacggattctacgcgcgggtgacgccgcgcagccagatgaacggcgtgggcgcgacggacctgcgtcaactgtcgccgcgggacgcgtggatcgtactggtggctaccgtggtgcacgaggtggaccccgcagccgacccgacggtgggcgacaaggccggccatcccgagggtctgtgcgcgcaggacggactgtacctggcgctgggcgccgggttccgcgtgttcgtgtacgacctggcaaacaacacgctgatcctagcggcgcgcgacgcggacgagtggtttcggcacggcgcgggcgaggtggtgcggctgtaccgctgcaaccggctgggcgtgggcaccccgcgcgcgacgctgctgcctcagccggcgctccgacagacgttgctgcgcgccgaggaggcgacggcgctcggacgggagctgcgccggcggtgggccggcacgacggtggcgctgcagacgccgggcaggcgactgcagccgatggtactgctgggcgcgtggcaggagctggcgcagtacgagccgttcgcgtcggcgccgcaccccgcgtcgctgctgacggccgtgcgtcggcacctgaaccagcgtctgtgctgcggctggctggcgctgggcgcggtgctgcccgcgcggtggctgggctgcgcggcggggccggcgacggggacggcggcggggacgacgtcgccgccagcggcgagcggcacggagacggaggccgccggcggggacgcgccgtgcgcgatagcgggagccgtggggtccgctgtacctgtgcctccgcagccgtacggcgccgccggcgggggcgcgatttgcgtgcctaacgcggacgcgcacgcggtggtcggggcggacgcggcagcagcagcggcgccgacggtgatggtgggttcgacagcgatggcgggtccggcggcgtcggggaccgtgccgcgcgccatgctggtggtgctgctggacgagctgggcgccgtgttcgggtactgcccgctggacgggcacgtgtacccgctggcggcggagctgtcgcactttctgcgcgcgggcgtgctgggcgcgctggcgctgggacgcgagtcggcgcccgccgccgaggccgcgcggcggctgctgcccgagctggaccgcgagcagtgggagcggccgcgctgggacgcgctgcacctgcacccgcgcgccgcgctgtgggcgcgcgagccgcacgggcagtgggagttcatgtttcgcgaacaacgcggtgaccccataaatgatcccctcgcatttcgtctttcggacgctcgaactctcggtctcgacctcaccaccgtcatgacagagcgtcaaagtcaattgcccgaaaagtatatcggtttctatcagattaggaaacctccttggctcatggaacaacctccacccccatctcgccaaaccaaaccggacgctgcaacgatgcccccaccgctcagtgctcaggcaagcgtcagctacgcgctccgatacgatgacgagtcctggcgcccgctcagcacagttgacgaccacaaagcctggttggatctcgacgaatcacattgggtcctcggggacagccgacccgacgatataaaacaacgcagactgctgaaggccactcaacgacgaggcgccgaaatcgacagacccatgcctgtcgtgcctgaagaatgttacgaccaacgcttcactaccgaaggccaccaggtcatcccgttgtgcgcgtccgaacccgaggatgacgacgaagatcctacctacgacgaattgccgtcgcgcccaccccagaaacataagccgccagacaaacctccgcgcttatgcaaaacgggccccggcccacctccgctgccgccaaagcaacggcacggttccaccgacggaaaagtttctgcgccccgacagtcggagcatcataaaagacagacccgaccgccaaggccgccaccgcccaaattcggggatagaaccgcggcccatctctcgcaaaatatgcgggacatgtacctcgatatgtgtacatcttcgggccacaggccacggccgccagcacctccgcggccgaaaaaatgtcaaacacacgcccctcaccacgttcatcattgaaagtctctccagtccatatgttgtcaggacgtgctgtcgttctccgcttgctgcgaagcccgttcttccgagtcgtgtcgctgcgtccagcgtcgcgcccaagatgggaatttgggtcttttcacgcgtagcctcctccaccacggctgctgatcgccgtcactaaggaccgacacggaggatgacgaggagcttctccccgactccgcggtccgcgaccggctacgtagcgcgtgtccctgccagtctccgcagttacaccacacgtcgtgagcagcgtgcacctgctgccgccactgggcctcggcgtgctcaggccacccgccggagcccggtctgagctccgacgcaggatgcgcgtactcaacgtgcgccttccagtccatacagcaacaccataggtcgtgcgagtcgtcggctacccgccgccaggccagttcccgcatgggaaggctggacacgccgaccgagaggtcaccgagcccggacgccatctcttcttcctctccgtcgctgtcattaagcagccaggtcacctcctccgctccgcgtccgccggtctcgacggaccgcgccgccgtcggcaacacggaaaacagcacgccagcccgagccgctaaggccgcatgcccctgccgcccaactgaacacgcataccccgctcaactgcgttttgccacccctgtcagtgctctcgctcgagcaccaccccgcatctcccaacctttttccaataaacgaaaccgacatgacacacgtaatgggtactcgtggctagatttattgaaataaaccgcgatcccgggcgtctcagcacacgaaaaaccgcatccacatcatagacaagttacagtccacagtcacatacacgataaacaataccaacagggtaatgtttatggagtaaaacactattgtccaggccacatgcgtgtatgacttccgcaccatcccgtactgcatgttccacatgtacgcgctagacgtgtaatccactcgcagttcggggacgcaacgcagccagatcacatccccttgcagtaccagacgcagggctagcgtctcgaagatcggcatcacatctaagttccgcacgttccactttaacgactccccgggaacgaactccacgtcgtcggcgtgtacgtacaggttctctcccacgccgccataatcggccttcggatcgaagacgaaccgactcatgttgcccacgatgctcccccgagcaaacaacttgccgttgtcaatgtagcaccggttgtcctcgatttgaaaccagggatgcttggccgtggacttccagggccggagcgcgtcttccccggctttagtgattccatcgggcaggcggatcaagggacccatggaggtccaaagacccacccaggctttccagagattgttcatggtgaaacagcgtgtggactgtacgctctttcccaatttatatcccagagtagtgacgtgagcccagccacctcccagattcctgacgttttggttgtctttcctgccaattcctcccgtaaacttatgattatcctagcccattcccgataaaaatacacggagacagtagatagagttacgaataaaccggtttatttattcaagtgtctcaggagattattgaacgagcgtggataccacgccgtcgtcagttcatggtggcattgagcagccatagcaccagagtcccggcgcccggtatcagacacgctgacctaccgggcgccttcgagtccgtaccccgcggcctgggtgttagagtccgtaccttgcagcccaggtaggtttcaggtaccagctggttcgtacctgttaaataaatcgcagacgggcgctcacccctacggtcaggagcacaagaacaaccagagagaacagatatacgagcagggttctgaacagcagaccccaattgtcgtctctcatgcttcgctgaaggtaccagttgatggtctgagagctatagtccatcctcacctgaggaacacacgcggcatatttcttggggtctccccacctcgtagacaacgtgatgtccaccatatccacggtgtgcgtcaccgggtgcccaccgatgttccactcgaaataggctccgcgctcatcatggtggtactgctcaccggacacctgcagtctgtccatgtaagattgagagacgatacccacgttcacaaagtgtttctcggtgaagttgcccgacatcctccccttgaagtacagcatgcccatatggaaccagcattggttctcctccactcgaaagtgggccgatctgatctccgataccaccacatccaggggccggggcaccgagtccgcgagtctcaggaacaagacggccaggatcgcgagcaccaacaccggcttcatggctccgaaggtccgctgctcggctccgctcaccgctccggtctggctgcagcagtgcttcgctgagaagtagcgtgtggactgaacggtgtttttgaatatatagcgtttcttggtgacgttgtttcccctacgtagtaggcaactacgtgccaaaagaggcgttacggtactttccgtactgggatttccaaaccgggactttccacacggcggtttcaacaccgggacttttcacacggtgatttcggcaccgggactttccgcacggcggtttcgccaccgctgacgttctcatcgccgcccacgtcaacggtggcgacaccgtactttcccatgcggtttataaacgtcaagagtcacgtcagtcgcccacccccattacacggcgatatcccgatagggcatgaggggacccgggtgtcgcgacatgtcgacgacaggtgcggattagtggtcgtgtcgcgacatggacgtgcagggggatgtctgtcgcgatagagttgatgtgacagcccgctacacctctctgtcgcgacatgcatacacaacgggccggcttgtcggcgattgtcgcgacatatcgttatcagttagcgaccggagttgtctatcgcgacatatcgtcgactatcgcgacagaaaaaataccgttcgtagagaatgccgtgttgaaggaacgcgcttttattgagacgataaaacagcatcaggagccacaacgtcgaatcccacgtccagtcgattcgtatgttatgctgcacagcaatgctagaataacaaccagcagggtaatcccgcaacataaatacaaagtcacagcgaagaatccgtgtcgttctatcaagcgaaacgcgttccaaacggccccgtcacagacgcagttattcataagcgttaacaaccggtggctaggatgaatatccaaatcacagggcagtagccgacggactcgttgacaggtcagcctaccctcaaggttcctatcgttcggacgggatttgtgcgttttaggcctctttttcgccgcctgcaagcattggtgcgcaaagtcctcacccagctgtttccagctatcatctgcatctgtgcagtcccctgtatcgttgtaacaaacgggtctgtgcgacttcgttctcggaacacaagcttgttgtcgcggagacagagagagaagggttttcgggtcacgcgaagaccgctcaccgggggtcggcaacgcacacatcaacagaaaaccgagacgaatcaagagatccatagtgaaggagtgatatcgacgtgcttacgaaacggcgattatatatgttctcaacaataccgccctacgttgtatgatgtaacgtgtgacgtgagtctgatccaacactgaacgctttcgtcgtgtttttcatgcagcttttacagaccatgacaagcctgacgagagcgttcatcggggcatgaagtacgcattacacaaactccatatatttgttacgatagaatacggaacggaggaggctttcgccacacctatcctgaaagcgttgcattctttatgataggtgtgacgatgtctttaccattcccacggctgctttgcgtgatgatgacattcatcatgtatttccattcacacataccttttgtgcatacggtttatatatgaccatccacgcttataacgaacctaacagtttattagcccttgacaggataggtcaaaagattatatgtaggttttccggtaaaccgaattgtgatatttctctgcaggaaatagaacagcctggtacctataaaacggacaatgcagtactgtagcagcgtaaccaagtaggtccacatgaacacgtacaaaattatggtaagccatcgtttttcataccacagcctgtagctgtcgtacatgaatgaggacggtcgaggaacccagggtagttgtaattgggggcgacattcgtactgtccagaagacaattgcacgggtttcagtgagatgagtactttagcgatgtcggcgggggcgctacgtttcaccgtgacggtgagaacttgaccgtcgttttgtatttcatgaggcacgttatacaagccactggtatcatgaaggatgacctctgatgcgatgtgaggattaaattgtccctcaaaccgccaaacgctggtcatgtttccaccgtcaattacgcagctgacggtgtgagataccacgatgttggacttaggtttgggggctaattgcctttttacaaattcccttctgtattgcaggtcctgctgccactgcttttccgtgcggaaagtcgccatgtcttccacacgtgtggcgacgatagacgccaccaaggtagctaccagaagcagctggatccgcatggcattaccgtatgtcaattagaaagttgagcggacacggttatcgttcctggcggatataagtatataaacgcgagttagcctttcccgtccgttttgtacacccgttccccacacaaatgacgaatacgacctttttttttataaaaataaaccacgtgtattatataaaaacatttacatagaaaagagacacacggatcaacataaggacttttcacacttttggggtacacaggcgtgccaccgcagatagtaagcgctggatacacggtacacagtcctggccagcacgtatcccaacagcagcaccatcgccatacagatggcgatcacgaccccgagctctaagtgtctgtattcatagtgtagtcgccgcaggttatccactgaattcccgtaactgaaataacgtatatggtaccgaggctggcaccacatgggtttgcatttggtgcacggcaccaaatgcagagtgagatggtccaagtccgtgggcacccactggcgcaaacggaatacggcttcggtggtctccacgaggcactccggggcgtgcagacggccccactttcgtccgcgacggcccgaccagccgacccgagccactatccctttctcgggatagaacgtaccctgtacacgccacacagcgtccaacacgccgtccttgacgacgcagctggcctgatagctggacacgttgttaagcggcggaaagcgaaactgacgtgccggcggagccacatagttcggttcaccgtgttgtcgcggttcgtcctccctatagtaatagtagtcgtcgtcctcataggggttgccggcgtgagccagcgttacccaacagcagcccaggccgacgaggaggcgcagccaccgcctcatggcggcttcgccagtcaatcgtctttagcctcttcttcccgtgaggtccttccggtggcgcggtgccgacctcggacccagggacgtatccacctcaggtacacacagcaggctacctggacaccgaagctgaacaaggctacgtgtttcacaaactgcaccagtaccacatagaggaatgtcaggtagcgtctctccgcaaacagccgttccaagtctgagggcgttacccgcagcggcaaccagggcagcctggacgccggccggcaatggagcacgctccggttacaggcactgcaggggtaaacggttaacatcacgtaagagagtcgtgcgtccacctgtgggagctcagtttcgtaacgtagagccccgtcattttccagctggggtgcgccgaccttgaaatgggtcgcgctccgctcgttaccccaggtgccgtaggctctcggggccgtatcggagaagttgccacgcacaagccaggcggccacgagtaccccgtgctggacgtaacattcggacacggaactggagacacggtagccggacacgtccccaaacccgcgagggtactggggcagacggacggacttgctatttgacaacggacagatacgagacgacgaggacgcagacgactcgtcgctggaccacgacaaccggagcgactccttggagcggctcgagagtacacttactgcgatcagacaccagtgccagaagaaggaacaggtggacggggaccacaggatcatagccgccggcaccgcggccggccgcaggaagccgcccggcgcgtcgtctgtgtgcgggagccgaaacaccgtgcctctttatatcgtcccgacgtgacgcgagtattacgtgtcaggggaaacccccgtcacgacgaacgtgatttgtaagtgacgcggggtgctgacggggttcggcccgagaggtgacggagcgcctcacgtcagtatgatgtccgatccgcgtcagccccgacgtggttgtggtcaccgaaacccacgtttatatggacgttgagagcagcgcctgaccacatgattcatcataccatttctcggaatcgggcccatgccgggaaagcacattccttttcagtaaacaacaatgacatcataacaaatcattttattcgcgaggtggataataaccgcatatcaggaggagggatcgggtgatgacgcaggccccgcagaacagtccgaaataaatttttagtattgccccatagtcgcctagataccagaggtacgttaagttcatcaaaacgcccatcggcgtcccggaatcgtataccgggcacacgaagcgttcataacaatcccgggaggcgagtgttagggtagcagagtagtttcggggtcggtttccttccggcgacgacagttccgtgggcagcagaatgtacagcgcctcggtagctgtcgcggtgccttccacgaggatgggctgccggtgcctttcgtgattttccccgtcgtgtagccaagccgaggcccgcaaagtcttaggcgaggggaattgtccatagagtttcaccgcacccttcagtacatggttctgaataacacagccgcacgtgaagtaggtaggttctctcgtctcctccgtggctgccgccaccactcccagccaccacaacaggcagatcgccagagggttccggaggcttccccggcgtagcatggttttgggttaaagcaaaaagtctggtgagtcgtttccgagcgactcgagatgcactccgcttcagtctatatatcaccactggtccgaaaacatccagggaaaatgtcggtgcagccaacctttcacatacagcccccaaaacacttgaatcactgccaccatcatcagcgtatactgcgccgacttaatcgtgagcgcgtagtacgccattagacggcgatcttcgaacaatagtcgttcgatgtcctctaacgagctccacaggggaacccaaggcacgaggcaccggggttcgcactctacataataagtttggcattggtggcagggggaaaagtagaacaacacgagttttgtgcgttggggaacacgatagtcccggagccagtagcgttttgcgacgaggctttcggagacgtcctccaccggcgtcggcactcgatccgcgtagccctccagcgtctggtagtacacccggggtgtcggcgtgggcacggacaggttcccgcgcagggtccacagagcctccagtcgaccgcccgatcggagcacgcagcgcgcctcggaatactctactcggtactccgaaacatcggacagaggcggtaacggctccgtctccaccaagggcggaggttcatcgaaaagagtcaaggataattcaggcatactacccgcgaccggggcccagagggctagaataagcattacaaggttcattctgtcttacaagggaaggctgttaccctgtctagactcaaaagctgtaaggctgtcttatagcatgtagtcttgcacgtcacggggaacagggtggtgatctagtgacgtcgggagaacacggtgttttagggtgcgggggacaaaggacagtacgacagattaggtgatagaaacgtttttttttatttatgaaaaagccagtgtgccgtgcggcctagggccccggcgtagtttggataccagatgggggccgtcaggggtactaccacgagcagaaacataatgacttggtccatgtatagcagcatagcggtgcgcagcaggtcgccgtccgtgtagcaatttgacggtgagcgataaagcaccgttaatgtgtcgcggataagcacgatcttgaggccgtagatgaagctcacagtcagtgctaaaatgatgcgttggtatggttcccaggactgcacggcgatgaagagccagagtatgggaagcatgaagcttagcaaacagaggatggctaaccgtcgttgcatgttccaggccatgagccaggctaggcccgtacaccagacgcagagcatggatgacaggacataggcctggattaccacggtgcgatcgaaacacagcccgatggtggacacggatatcgtagtgagggtggtatataccatgaccagcatcagggtcccgggtcggcgccgacgttccagccagtacgcgtggcaacgcagagcgcagggtagcagtgtgctccagaagggcaatgtatcgcgcaggtagggggccgtcacgcgccacggtatgagcatgaaaaggatggtagtggctatggtggcgctggtctggaacacgacagtgccgtagagacgtaccatccagagaaagtgttgaacgctccgcagggtgtcttcatctttggtgattacggtgactcgacggatcggcggtggtgacggcggcgacacgggtgggggtttctctttcttatggccgagtggctcgccttggtgaaactggatctgtaccatgacgggtgctcgacgaacagtcgtgggggctttaggtacccggcaagttttatagagaaagggggacgatgggtggtggctacgagccaccgccaccttcgcaatacgaggatctgaaggcggcaaagacggtcgtccagggcaggcgccagaggttgggactgagcacgatcagcgtgattttaaacatggtcaccagtcctacgtagatcagcagcgagccgcgtaacgtctgagcagccggcagttcgtcgcggatgtaacgcgtgccgtagaaagtcacggtcatcataaggaagacgatggcgccgtagccgtagagtagaatacgctgatgatggaacacggtctggtcgccgataacccagagcgtgatgaaaaaaacgctggtgagtacccgtgagcatatgagctcccaacgcttagcgcgaaagctgtccccaaccatgacagcgccggtgcaagctatccacagcgtgaggaccagtgtgtagtcgatgaggatggcgggcaggtcggagcaccaggtgtagaaaaccgtggtaacggagaggaggcctacgtagcccatggtcaataccacgtcgtcggggtgcctttcgccctgtatcaagaccaaacaccagagaagggagggggcaaaaaccagcagcagaggggaagattcatgttgacatatgttgtgggaatcggggatacccagccaaatcattccgcagaaagccgtactgatggcgatgtgaaagaccactagggcgtagacccggacgaggacagcaaaacggcgcagccacataaggccgtggtgcagctgcaggagggaagcccattgcggcgaatgtagcgacggtagcggcgggtccatgaggcgggtgatgcgcccgagtgaacgggtgagcgtctcggtggagtcttcttataaaccagcggagctcaggcagccttgctctggaacgtcgcagtggtggtgttgaggatgacgctgagcgtgccgttgtcaatcaggtaatgatgataggtgccgagcttggccaggtagctgaacatttggtcccagcgtgccgaccacaccacgggcgtgagcatcaggagtgtggtgtgatagattagtgtttcggtggcgtaaagtatcagcgagctgcggatgacgtggctcacgggcattttggtggcgatgtagcgcacgtcttggaaaaggacggccaggatgcagcccacgaacacggtgtagagacacagcaaagtcttatgtaaccaggtgtaagtagaagccaggacgctgaccatcaccgtcaaaagtgtggaggtaaaaagcgcgtcacgccacacggagctgagacggtgctcccaagccacgccgttgcaggccacgaacaacgtccacgttaggatgaggctagaaatgccgatgggcgctgtggcgcacaggttgagcccggcggtggtgaacgagagaagcgccacatacagcgcaaacaccaggccgttgctggggtgtctgtgatcggtgagctccagcgcgcccagaaccaatactggtgtgcagctaagcaatagcggcgagggatcgtcgctgcacttgtagcccagcgaggggtaacccagccaaaccagcgcgctaatgagtacgctgaaagcggtttccagcgtcagcaatccgtagacacgcatgacaatcgcggtccgccgtagccaacacacggcatcttcggaaactgtggacgctgtttccgaataccgggaggagatcgtgcttccctcttccaaggatcggaaagtagcgtccgtcgtttccgcggacgcggcttccctggtacgctccgtttccgacgacgcggtttcccgctgcgtggaaactgtctccatgtcgggaccgcagcgcccggcggcgtatccgcaaggtctcgaagctacagcttgtcagaggaaaagtaggtttgcaaaaaggtgcgcagggtcatgattctcagcaccatcagcagagtgaaaaccagactgagaaacaccttgacggccgccaaaagcgcgcgttccagcggcgtctcgtagcgtacagccagggccgcttcgtggaaatgcgagacggctagacaggtaatgagcacgctgaaggacaagacgatcttaaagcaccaggaccaaccacgcctcaagatgaccaccacgattgccgtgaaggtcaacgtgatcaaagcatggacgaccacgatctgacggcggacggtacgttcgggagccaacaacgctacgccggtgcagctgagaaaggccagtaaggtgaacaacgcggccgagatgaccaacgtaccgtccaggcagagacatatcacgatcaacggcggcacgtgaagcagcgtgtaaaagagcagaacgccgatattgctgggatgcgatgtttcgtaacagtgaatgaagatcactgacgtgacgggtatgacaaagacgaggctgggcgaggactccgtgagacacagacgagaatggtgaaaccacgtcgcgggcgccgcgtagcagaaggcgctcaacaacgcggtcaagccggccagctgccaacccacggcgccataggtgtgcagcgccacgcggcaacagtcgacccaagccagactgcgggtcgccagccgggtctcttggatcccggggggcacgtagatgaccgtgccatcggtgggtacttgaaaccctttttctcttctcatggtgcgctgcgttctctggaaacggctgctctgtccgaaaaccagttccgaacgaaaatctagggcgagagggtggacaacggcgtcgacgacgaagcatgggacaggtcgttcggcgttaacgtcatcgcgtcggacgacggtagttctaagagacgtagatcgctcagcaggtcctgacagttgcggattcgcaagatcagaaaaaaaagggaaatgaacgtaataaagagctgtagcgacgtatgcgccacatcgcgtggcataagaacgtgacggacgaaaaggacctgctgcgaaaagtgaccggcgaagataaggcccaccgtgctgtagaagcccaaaagcagccgcaggggccaagtccagggccgcgtgaagacgatgagaacgttgaccagaaagaccacgacccagacgccgttgatgagggtaaattgatcggacagggtgcagttgtcgcgacagatgaagactacttccgcgcagagcaaggtgatgaccaacgtgagcacaaacgacgtcaacacctcgcggggctcctggcaggcacacgtgacacctagcgccgggatgtgcgccaggaggccggcgagtaatagcaccagctgtcggaacggacgacggcagcgcgggtgccggtttcgctgagcgagaaccggtcgctcatagcggaaatacacgaagagcgcggaggccacaggcaccaggaggagcacctcgggcgcccagacaacgtgacaaggaaagcccggacgcgacttgagagtcgctgtagggaagaccagagagaagctacccaagacggccaccgccgcggagatttggaagaggagcaagccggcgattcggacgacaacctcgaagcgatgcacccagcccagcacggccaccacggccgcttcatcatagtcgtcgttgttgccgctgtcgaacagccgccgaaacacgatctgtcgctgggtcgcggtgggaaagcgcagacccatgacagccggaggctatatgaccgcgcgtctaagacgcgagatccgtggggggacttttagatgtttgggcggcccgcggttctaacaggcttgattggtggagacggccggcgcggcgggtgggggaaacgacgagtttttccgttacgccatggttcgcgtgaggtttctctgtacctcccgcaaaaggtcacagcccgaaatggaggccgcgttggtggccccggtggcgcgtgacgataaccaggtcatccaagcgatgagtttgtctaatgagtcctcggtggtgaagaggatgagaatgagcaggtacaggtacaccaggttctcatagagacacaaggtgagcaggtcagcctcggaccacgcgatctcaaacaggcgcgtggtgtcaaagaccgtgacgaccagcatgaagctgagcgccatggcgtaatagcccaaaaaaagtttgtgccccaacggtacgggctgcaggtaaagtgcgatcaagaacgcgataacgccgatcacaaacagcgtgacgatgacctgccatcgacggtgattatggccggctagacccgtgacgcagctgcagaggctaaaaagcacgcaagccaagaggcccgagaaggtcactagcgtagaggaggagcaggcgctggccacgatcaccgaaagcgtcgtgagcacgctataaatggtgagcaggccagggctcggtggcgacgtgaacgatccttcatcgcgtttgccgtgcagcagggccaaacagatggtgggcaccatcaaacttaagggcggcataaagccggtgcaacagagaaagacggtgcctttaagatgcggaaaagccagcaccaggcccagacagagcaagaaggtgcaggtgccctgcacggccacggtgctgtagacccgcatacaaagtaaaaagcgacgtacgtcgttcgtcgacacggaggaaatcataatgactccgcgcgagggtcgcgggggtgggggcgcccaggccgtcccggtggcctctgagttcggagacatgacggcggtggcgatcaaaaggcgcgtatgagaaaccgtttatagagtgtaatagaatcaccgtcattcccacacggcgttcccccataaagtcacgtaacactcgagtaagcgtgaaaaagctttattgttgaataaaaaacacgagtacaacaccgagttgcggtgtcctgtctgtctactgggtggggaaggttcatcgtctgtctctagagggaaggtggggaatgtctaagcgagcgggagcgtgtcatctcccccatctttttacaacaagctgaggagactcacgccgtcgatgcgtccgccgtgtttctcggcgtactgctgcacccagacgtggccgctaaatatggcgacgctcatgtttaggagactcatgacgatggtgtacaacacgacgctgacacagacgctgtttttagacaacgttccacgctggtagatgagatccagggtctcgtaaataagcacggccgaagcggcggtcaccaccaggacgtagagtccgctgtagatcttgctgacccacagcacgggcgaaaagtaaagcaataggtaaaagacgatgacggaccagccgtagccaatcccgatgactttccagcgcgtgggattgttgccggccaggtaggtgagaccgctgcagagaacgaaaaagaccatcaccagggcaaacgacagaccgatgacgcgcctttctccgcaaaagcccgtgcacacggtgatgccggtgttgatcagcaagcacgccaccgtgagatgagcaaaattggtggtgtgtgggcgaaactcggcgaaaccgcgtagcatagccagcgtggacacgggtacgatggaggatagggctggcactatgccgttggcgcactgtccctgcacatcggggaaggcgagccaagccagcaagcagaccgtgagggtacaagccagctgccacacgagcccgtgatagacctccatgagcagcttaaagcgtttcaaccattggaagagctgctgttcggccaccagcgcgtggctgcgatggagcggcacgatggtgaccgtcggcgactcatggtgttcggaaaccgaggcggtgtcgcccatgctgccgcttacgaccgctgtcggtctaaggtaggcgtcgatgaaacagtccgtcttatcagcacccggttaccgcggatttgattgacgtcacgagtgtggtcaaaccgtggcggcaccctgtatccgacccgtcgtcatgggctccacaaccagagcctcagaagatggtacatgccgatgaataaagccacattttcgacatagaggcgtagcgagggctgaaaactctccgggaaagaactctgacaggtgatcagggacagatcgtgaattagcatcagcgtcaccgtcaacagcgtcgtcgcgtgtaaaccgagaaagaacggggccgcggcccgcagcagccaaagtcccagcgccgtagcgcagagcagagacaggaccgacggtagccacagccgccggagagacgcgccaggatcgcaacccaaaagcgaggcccccaggcagctgagatctaccgccagggcgagaagagccgcgccgacaaaggcctgcggcgacggctggcacatcagcaaggtcagaaaggctagcgcgtgcggcaggcagtaagccaacaggagtgggagtttgcggggacaacggtcgatcgacggaccgcgtagcagcaggaacaggcagccgacgggcacgacgaggctgagatgagaaagcggcggtgggtcgtcgtcccgtccccgctcgcatagctcggccaccggtggcggcatgagccaccagctgagcacgctgagggcgacggtggcggtaagctggaaggcgacgaggacggaggcgcgcagccataccgccagcctctctaggtaggggactacctcctcgacggtccattctagcgggacgacatgaagcatggcgacaagcgcggctgctgtgaaaacgggcacggttttataggcattaggacttccccgtcgtactggcggctgtcaaagtcccgttgtccaaaggcgcgccgtccgaaagactaatccaacggggacccgagagcatgagcaacaacgtgagaaagatggccatgctgtccaggtagagacagacggcgtgacggatgcattggttaggtgggcagaaaaagatgaccataagactgtcgtaggccagaatacccaaaaagaagctgatagagaaggcgcacaacgtcaccactatcttctgcagccaatcggcgtcgcttagcagagcgagcgtgaggaacgaaagcagcattaccacgtagacgcagctgatgcatttccagcgacgtcggtcacggccacctagaaacgccagccccgtaaaggagataaacaacgccagggtcatcacgtaggaacctactagtacgcggctttcagagcacatttggaagatggccgccgtcaggctgttggccaacagatagatgaaaagcaccgtggcgttactagggtgttcgttgcccaacgtgtacgtgatgaacatgcagacgatgggcacgagcacggtgagaaagaagctgtagttctcgacgcaaaagttgcggttttgtgggaaccccaaccaaaaaacgcttcccaagccgaagctgaaagccagctgaaagatgaagatggcgtacacgcgcagccatacggtgaactttttgaaccactcgagagcctccatgcgggagagcagcagcgcgttagcctcctgcgcctgcatggtggcgacggtctcggcacaaagccgctgcggcgcacctacccttctcttatacacaagcgagcgagtggggcacggtgacgtggtcacgccgcggacacgtcgattaggagacgaactggggcgacgccgctgctgtggcagcgaccgtcgtctgagcagtgtgggcgctgccgggctcggagggcatgaagtagagcacggagacaaagaggtacatgaggtccatgtacaagcagagcgcgcccgggatataactctcatactcgatgtcgtgcaggatgtcctgcgtatcgcacaccaccgaggtcacgatgacggccaaaccggctatcatcaccaggatctcacttaccgcctcgggaaaaagagaaaatacggcgaacagtaagagaatcagcgtggatgcgcccgtcaatagggaacgctgtaattccacgtcgcgggcaaacagatacgtagcgagcgtgaggaaacaaaatagcgtcactgtggccaccatggcataaatgactgaacgatgactaaagtggaagcctgacgccgtgacagccacgctggtaagcaacgtgtacgtcagtaagatccatacgtttttgggaaagttgggctcggcccaacgcaacagacctaggcacacgatggagatcattaagcaagacagcgtcagacgcacgctggaaaagagctgctccaaccggtgcggcaacaccagccagcaaaaggcgcagacgctcataaggatgaggcattgcacccagataaggatgtagatgcgcagcaggaagaccgaccgggctatctggacctgaccgcggagcgacatggcggcaacgccggcggttatcgccgagattcgtctaaatacacgaagcgaactagaaaacgcacacacgtgatttgcaaaaagaaagcagctgccggcttattattttattaaaaatttatctgtgcagaatcataagtttatgatgaataaaaacggggaaagggaatctgcttttagggacccgggtctggtccgtcgtctcccatctggtcgggttcggggatggggacctgtttcagcgtgtgtccgcgggcgtgcatggcttttgctcgccggccgcgctgtaaccaggcctctttctctgtggtcggcgagtcttccgacgggtagggagcctgggagtccatcgcttcaggcccaccgctcgttccctcgaccgtcgtgtcgtcctcgttttcgctattacacggggtttctggagtatcgcctatacggttggcgattctccgggggcggccgctctcgtcctcgtcgctgctatcgccgcccggtaattcgacgccgcattcgttgtacggaacgcggcacatgggcggcggaaagaacttgggcatgcgaaagcagcgttgtccatccacggtctgcgtggtttcatcgttatcctcccataatcccccctgtagcgccggcagcgtttcgacgctgtgagaggggaaggcccagttctggttgtcttgcagcgcgcccgtgggcagtaggtccgtgcggccccatgcgctgctgttgttgggtaccttgtcagtgccgcgagtaggtcgcagaaaccagtccagagcgctctctagctgcgagcgtgtgatggtgcccagtgcgccgtgccagcgcagcacgtctcttttcagcgtgtggtgacagacgggcagctcctccaaccgacactcgccgcgcaatccgcggtcgaagcggcagagaccacgcagtttaagcagaccgcacttgagaaacatgtgaaaattatcggcaatgcgatataggtccgagtcctcgatcttgtgtaggtagaccacgccaaacttgtcgagcagcaccaggccgctgggcacaaaaggcccgtaggccaggtaatagcccacgaggccgacgacgtaccactcgcagcacaagcgttgacgaataaagttcagaagatcgcgaaagtccgcggccggcatgtggtcaaaaggccggcaggcgcgcaggccctcgatggagcccagcatgagcaacggctccacctcggtgcgacccggcgtgcggatgaccaggttgagaccgctcatttcgcgggccgtcttggccacggccgcagcgtcagtggggtcggtgcagaggaatttttgcacatgatagcgcggttcggtggtggcgaacggcgtttgtgggtgccgatacacatattcgcaccagagtaggccgttcttggaaaaggctttgatatcactggccacctcgtagagcccgtcggtctcccagtcgtagacgtagacggtgccgtaatgacttagcatgagcacgcagggcagttcctgcgcctgcttggtgtttcgtgttagatcgctgtcgggtggacgcacggctagtacaccgacggcttccagggtgtcatcgcagcagagatagtcggcggccagagaacgtgcgtaaatctgcgggatggcggcctgttcgcgcatcactaggaaccagttggcggggttgcgcagtgctacggtggttccttggtggcgttgcacgtaggttctcagcgccggaggatcgtactggcgcagatagaggccttgcagcatcgataacgtcttttgaaagacggtgtttctaaattgaaaaacgccgtagtcgcagcggatagcatcttcgcagcgctcgtcgcgctgtcggagataggtgccccaggcttcggcggcggctttggtgagtagggacatgccggcggagccgtctcgacagcgagtcggataaagcgcgctgcgcgaaagcttaatataggagcagcgtcagacgaatcgcggctggtggcccggggggtgggacgcgccgcctacacaaagtgctcccgaaaatcgaaactcttgacccactccggagacaaatccgtattcagattgatgcgtcgagcttccacttcggcttccgaaacctcggcctccgtccggtaggcgttaacaatacgctgacccaggtgccaacgctctttctctgccaaacgccgttgctcaaaccattcgtctacgtccttgaggtcaaagacagtgtcctcctcaaggtcaaagcctaggtcttcccactcgtcgtcatcgctctcgtggccggcggccatacgcgcggcaaccgcgtcttcccctcctcttctttcaacgttgggtaccacgttgttttcttcgggttccataggttctgcgccgctgtcgtcatcatcctctccctgctcctcatcgtccgccaaggcgtcgtggattacctccaggttctgattgtcgggtacgacgtggttatcttcgtcgtcgtcgcgtggcatgggcggcggccgacggcggacgaccggcatggcgcggccgtcgtttccttcgtcttcctcttcaccgtctcccaaggaacgcggtcgacgacgttccgcgaagtcgccgcggaccacgcgcgcctgccaaatggtaaacgcgtcccaaccgtcccagttattgagcatttcggcgcgaaaacggtcgcctcgacagagccagcgaaactgccgcgcgtagtcgcggtctacgccgctgtcgaacatggtaaagtgcagacgcgccgcctcgcccatgtgtacgcagcctccgttgcgttccagcctggccgcgcgccgtagaccgtgttcgtagcggcgacgcacgtacaccttcatgaggccggcgcgaaaaagttcctctaggctgtcggccagccggtagatttcaccggctagacgctgcaggggcggcgagcggtccagatgcgacttgacaatcaccacgtaaaaacgacagaaacggtcgaagatgatgaggaaggacgtgtcaaaaaaaccaccggcgcggtaagagcccacggcacccagcaggtaccagcggcaacgcagttgcagcgtgacgtacatttcgcactcggccaagcgggcggctggcgctacctcgaagggccagcagtccgtcaagcagccgaaactggtcaggagtttcaacgttttggcatggcgtccaggtgtatgaaagttcacgtcgcgtccgtggtgttcgccaacgcaggcggccaacgcgtcggcgtcatgaccgtgacgcagcagcatcgctaccacgtcgtgcggtacccgcgtagcaaatggcgtctgtggctgacggtatacggcttcggtgtacatcataccgtaacgcgccagctcgtccagatgacgcgcgcacagcagcagaatctcttgcgagggttcgtagatgtagaggcgcgtaccgccacccatgcagagcaccagctccgtctcttcgtagtgatcttccaccatgatcacgcacttgcctagcacgataaggcgttcggggcaacaaatcacgtcgtccagcagctggtcgcgtagctccggcatggtgctgccgggccgtacctgcaggaaccagttgtgcggaatgccgagcgacagcacctggtcgacgtggttacggacccagtcgcgaagcacgtcggcgctgtactggcactcgaagatgccctgaaagtcgcccatgacccgcagaaaagtttcgtagcgcgtgtggcaatagaggaattcatcgtttcgcgtaaacgtgggagctccgtcttcccaacgtgtacgccacatgtcaaaagaggccgccagctagacaccccagaaaagaagcagagaaagagacttctttgtgcgacacgttttattctgcgtcctccgctcgacgttcaaatctggatgtactcgcgcacacccgtcaggctctttaagggaaaagggtccgagtacgtcactaaccgcgactgatgcaccagggcggtaatcacccgctccgcgccctcgcgcgtcgacgaacgcgtcgtcaccaggcaatgcagccgcgggcccgtatcgtcctgatgaccagcggcctcgcgctcggctgcttccacaccgacaatgtcgggatccaacacgtagctctgcgagttggtgtcgtagcggtgtagcaccaacgtgttggggtccagacgctcccacgcgccctcgtgcgggtcaaaacgctccgttaaacagagccagtcatactgctgctgcagaatacgccgctcgcgctcgcgtcgctcatcgggcaacgcggcgtcttcgttgaagagaatgtcccgcttgtggtctacggcacgctcgtggtggtgcgggcacaggtgacggtgttccatacgcgtctgacgttgacgctcgcgctcaaaacgccggtgtcgaaagaccattttcagcaaccccatgcggaaaaactccgtgatggtgttggcaacgcgccgcacatagtggttggggtcgtccatctggatggcgtacacggcaccgaaccagtccagcagtaccagcacttcggccacaaaactgcgtcccggtcgcggacgtcccgtcacgcctagcacataccacggcgtggccagattagcacggacagcccaccaccaacgacggctctccacctcggtgagcgcacaaaagggccaaatgcggtgtaactgctgtaccgttttcatcaaccgcataatcaccgtaccgtaacccggtgtatgcaactttacgtcgcaacccaggattcgttcggccgtggcgtacgagccctcgggcgtggtgtcattgagaaacaaaacatgcatggtacgcgcgcccttaggatatcgtcgcggaacgggtaccgtcattctccgcagagtggtgtgaatcacgtcgcgatacgcaatctccgaacgtgacacaccgtaacgtgccagttcgtccaggttgtgcgataccaacaccatgtacttttcacgagtgtcgtaggcgtagacgcgagaaaagcgacccataaaaaccacgtacggagtagccaccatgccatcatggtgatcgcgacgtggctcgggcaacaaaataacagcgtatcccaacggcgtcaacggctcgcggcaacagatgagctttgacgccgcctgtttggcggcggtaatgatcccgtcctccgtacgtaacatcacatgccagcccttggggggacccaaggacagacagcgtccctcgttacgatgaacgtaacgcgtgatttccattggctccaggcaaaagaacagttccttaaaatcccgcaacacttgtcggtataacgccatgggatcctcggccgccacaggcagcgcggggagctccggcggcataactgcagcgccgtcagggccagaacccgcagccggatccatcattgagcgacactctcagccggacaaccggcgtcactgacagaagccgagccaaatacagagaaagcaacgctacaccgtcaccccgctcccaagcgccgcggaaagtgctccgatttttcaccgtcgttcgcgacgttgatttgcctcggtctgagaaccgacctagcgttcggaccggtgcgcagaaacagccggcggtccgagccactgagcggttcacagccccggccgccgatagttaccggagagacgttcgagctgcaggtacatcagcgcttcccgcttcgccaccccgcgcccgccccagtttatactctccgacgccccgtccaacgcgcctgtggagggccaatcggaccgcgggagctctccaagtggatgacaggcacagccgagtgcccgaccgtgaagagccctcatccacctgaacagaccgctaaccgaaggaccccgagtcgcgtccgtcggtcccgacgtccgtcgccatctggctccctgctgttggctacctctcggatttcaaaaaagagcacgtgccgatgacggtgcacaggaaagagccaaagtgtcacggcgtctttttttatttgtattcctttcctgttttgtactcgtaaactgttgatgttgtttttacatccaaaagggcaagtaagaaacaggatgaggcatggtaggtttgggcgtggggcggccctccagcacggcggcccgggccgcccggcgggtgagcacccggcgttgcgccgtgtctatcttgtgtttcttctgtgtctttttcctatcttgttccgcgacggcctctttcatcacgttcagcatgcgttcctcgacgccctccagggatcctggggaggagggagtcctagtgaggcttccaatgttgttttgtggattttcggtttccttttcttggtcgtcatcgtcggacgtgtcgtcttcctcttgatcctcttcttcgtccgagtagtagacgcatagtccttggttcatcaggctgggattcatcaggttctgacggggaatccgctgttgtagacgtttaaccgcccgttccaggcgagagctcatgccgcaccagacgctgtaacgccgcacgggcccgtagcgggctgtttgttcgcgtacatgatcgttgagctcttgccaatattgtttggcacactccagatcggaggtttgtggatagtcgggtcggatccgcggatcccaactgacatcggcggtgccggagacttcgtccagactgttacgcatagagcaccagtcgggtcggacgataaacctgtccttgcggattaaccatttataacgtagttcgtgatggcgtgtagaggcccgtacacgctccacggtcccaaagcggtcccagaagggaaagttttcgtgggggcagcgacccggcacttccagacgttcggcgtcgtccacggcgtagtgaaaacgccggccggcctggtaaattttgagcagacccactgttaacaacatatccacgctgtcagccaaccgccagatctcgcggcgagacacgtcaaaatagaaaaattcgcaggctcggtcgaccaggatcacgaaatcggcgtgaaagacgccggagggtagcgattcgcccaccacacccattatcatggtttcacagcataagcggtccacaaagaacttcaacaggtcgttgaattgctccgtctccatacagatgaagggccagacgcctttgaggttctcggcctggccgcagagcagtagcggacgtgtcatctcgcccggagtgcgcagaggcacgcattcgccgcgataacgacaggtcacacgctgtagttcgctgatgctgttgtcgtgcaggcgaaggtcgcagataatatgatccggttgcgtggttagcagcggcgtgcgcatttgctcgccgtagatggcctcgcagtgcaacagcccgtgtcgcgcaaaatcgtccaaactgtgcgccaggtagtaaagcaccccgcgatcgcggtctagacaccacacggtttcgtaacgtcctaacaggagcaccagacgggcctggctaggtggctcaatttcctctacatacacgaaaaagtcgtcatcgtccgagtcctcgtcctcagaagaggaccgcggcccgtgtactctgggcaacacggtggtagagaactgcaggacgcccagagactcgagcgattcttcgcagcagatgagctgaccccagggcgtttcgggcccgtcggtgacagccgcgctgccaaagatgtcctcaaactctacaaaatctagacgccatccgggtggcgctgaaatgggaaggctaatgttcatatcagcatagctacgaactaagtggcggatgtcctgccgcaagtcttggcagagaatgagctttcgtaaacccttgagggtcctccgaacaacggccccagacgcgtagcgataggactggcgcatggtgccgcggcgtggagcggcacttggcagcctattttatggagtttcttcagtgacgtggcttgttcacgtcgttcgtgggctgcggttggcagctccggtctgtaaaccacccgaaaagactgacatcgacgtcaaagactcacgtaatttggaacatgtgcgaccgcaaagtgcgtcagaatagcacgtggctttaggacataaaaagtaccgtgaggtctagacgtgggttttgtgattgacacttacaccaggtaagccaagggacggtgaaactgtatgtgaggaatctgggtgcttagacgactaacgtgtaatgctttttacaggactgttcgacaggtgatagtacctgtaaggtgatgaccacctctacaaataatcaaaccttaacgcaggtgagcaacatgacaaaccacaccttaaacagcaccgaaatttatcagttgttcgagtacactcggttgggggtatggttgatgtgcatcgtgggcacgtttctgaacgtgctggtgattaccaccatcctgtactaccgtcgtaagaaaaaatctccgagcgatacctacatctgcaacctggctgtagccgatctgttgattgtcgtcggcctgccgttttttctagaatatgccaagcatcaccctaaactcagccgagaggtggtttgttcgggactcaacgcttgtttctacatctgtctttttgccggcgtttgttttctcatcaacctgtcgatggatcgctactgcgtcatcgtttggggtgtagaattgaaccgcgtgcgaaataacaagcgggccacctgttgggtggtgattttttggatactagccgtgctcatggggatgccacattacctgatgtacagccataccaacaacgagtgtgttggtgaattcgctaacgagacgtcgggttggttccccgtgtttttgaacaccaaagttaacatttgcggctacctggcgcccatcgcgctgatggcgtacacgtacaaccgtatggtgcggtttatcattaactacgttggtaaatggcacatgcagacgctccacgttcttttggttgtggttgtgtcttttgccagcttttggtttcctttcaacctggcgctatttttagaatccatccgtcttctggcgggagtgtacaatgacacacttcaaaacgttattatcttctgtctatacgtcggtcagtttttggcctacgttcgcgcttgtctgaatcctgggatctacatcctagtaggcactcaaatgaggaaggacatgtggacaaccctaagggtattcgcctgttgctgcgtgaagcaggagataccttaccaggacattgatattgagctacaaaaggacatacaaagaagggccaaacacaccaaacgtacccattatgacagaaaaaatgcacctatggagtccggggaggaggaatttctgttgtaattcgatcctctctcacgcgtccgccgcacatctatttttgctaattgcacgtttcttcgtggtcacgtcggctcgaagaggttggtgtgaaaacgtcatctcgccgacgtggtgaaccgctcatatagaccaaaccggacgctgcctcagtctctcggtgcgtggaccagacggcgtccatgcaccgagggcagaactggtgctatcatgacaccgacgacgacgaccgcggaactcacgacggagtttgactacgatgaagacgcgactccttgtgttttcaccgacgtgcttaatcagtcaaagccagttacgttgtttctgtacggcgttgtctttctcttcggttccatcggcaacttcttggtgatcttcaccatcacctggcgacgtcggattcaatgctccggcgatgtttactttatcaacctcgcggccgccgatttgcttttcgtttgtacactacctctgtggatgcaatacctcctagatcacaactccctagccagcgtgccgtgtacgttactcactgcctgtttctacgtggctatgtttgccagtttgtgttttatcacggagattgcactcgatcgctactacgctattgtttacatgagatatcggcctgtaaaacaggcctgccttttcagtattttttggtggatctttgccgtgatcatcgccattccacactttatggtggtgaccaaaaaagacaatcaatgtatgaccgactacgactacttagaggtcagttacccgatcatcctcaacgtagaactcatgcttggtgctttcgtgatcccgctcagtgttatcagctactgctactaccgcatttccagaatcgttgcggtgtctcagtcgcgccacaaaggtcgcattgtacgggtacttatagcggtcgtgcttgtctttatcatcttttggctgccgtaccacctaacgctgtttgtggacacgttaaaactcctcaaatggatctccagcagctgcgagttcgaaagatcgctcaaacgtgcgctcatcttgaccgagtcgctcgccttttgtcactgttgtctcaatccgctgctgtacgtcttcgtgggcaccaagtttcggcaagaactacactgtctgctggccgagtttcgccagcgactcttttcccgcgatgtatcctggtaccacagcatgagcttttcgcgtcggagctcgccgagtcgaagagagacatcttccgacacgctgtccgacgaggtgtgtcgcgtctcacaaattataccgtaataaaaaagcgctacctcggccttttcatacaaaccccgtgtccgcccctcttttccccgtgcccgatatacacgatattaaacccacgaccatttccgtgcgattagcgaaccggaaaagtttatggggaaaaagacgtaggaaaggatcatgtagaaaaacatgcggtgtttccgatggtggctctacagtgggtggtggtggctcacgtttggatgtgctcggaccgtgacggtgggtttcgtcgcgcccacggtccgggcacaatcaaccgtggtccgctctgagccggctccgccgtcggaaacccgacgagacaacaatgacacgtcttacttcagcagcacctctttccattcttccgtgtcccctgccacctcagtggaccgtcaatttcgacggaccacgtacgaccgttgggacggtcgacgttggctgcgcacccgctacgggaacgccagcgcctgcgtgacgggcacccaatggagcaccaacttttttttctctcagtgtgagcactaccctagtttcgtgaaactcaacggggtgcagcgctggacacctgttcggagacctatgggcgaggttgcctactacgggggttgttgtatggtgggcgggggtaatcgtgcgtacgtgatactcgtgagcggttacgggaccgccagctacggcaacgctttacgcgtgaattttgggcgcggcaactgcacggcgccgaaacgcacctaccctcggcgcttggaactgcacgatggccgcacagaccctagccgttgcgatccctaccaagtgtatttctacggtctgcagtgtcctgagcaactggttatcaccgcccacggcggcgtgggtatgcgccgctgtcctaccggctctcgtcccaccccgtcccggccccaccggcatgacttggagaacgagctacatggtctgtgtgtggatcttctggtgtgcgtccttttattagctctgctgctgttggagctcgttcccatggaagccgtgcgtcacccgctgcttttctggcgacgcgtggcgttatcgccgtccacttccaaggtggatcgcgccgtcaagctgtgtcttcggcgcatgtttggtctgccgccgccaccgtcagtcgcaccacctggggaaaagaaggagctaccggctcaggcggccttgtcgccgccactgaccacctggtcactaccgccgtttccgtccacgcggatacctgacagtccgccgccaccgtaccagcttcgtcacgccacgtcactagtgacggtacccacgctgctgttatatacgtcatccgacatcggtgacacagcttcagaaacaacgtgtgtggcgcacgctacttatggggaacccccggagcccgctcgatcgacggctacggttcaggaatgtaccgttcttaccgccccgaattgcggcatcgtcaacaacgacggcgcggtctctgaaggccaagaccatggagatgcggttcaccatagcctggatgtggtttcccagtgtgctgctgatactggggttgttgacacctccgagtaacgggtgcaccgtcgatgttggacgaaacgtatccattggagaacagtgccgccttcgaaacggtgcgacgttctccaagggagacatcgaaggtaacttcagtgggcccgtcgtcgtggagttggactacgaagatatcgatattactggcgaacggcagcgacttcggttccatctcagcggactcgggtgtcctacaaaggaaaatataagaaaagacaatgaaagcgacgtcaacggtggaattcgctgggctctatatatacaaaccggcgacgccaagtacggtattcgtaaccagcatttgagtatacggttaatgtatcctggggaaaaaaatacacaacagctgttggattctgatttcagttgcgaacgtcaccggagaccgtccacgccgttgggaaagaacgccgaagtgcctcccgcgacccgcacgtcttctacatacagcgtcctcagcgcttttgtagtgtggatcggatccggcctcaatatcatctggtggaccggcatcgtgcttctggcggtggacgctctcggacttggcgagcgttggctgaggttagcactgtctcaccgggacaaacatcacgcatcgcgaaccgcggcgctccagtgtcaacgcgacatgttacttcggcaacgtcgacgggctcggcggctgcacgccgtttctgaaggcaaactgcaggaagagaagaaacgacagtctgctctggtctggaacgttgaggcgcgaccctttccgtccacacatcagctgattgtgctgccccctcctgtagcgtcagctcctcctgcggttccctcgcagccccccgagtattcgtctgtgtttccgcctgtataaaaataaagagacgggaggctgatcgcggccttcagcgtctcatttgtctttactctcgagtgcggtcggtgtctcgtcggtgagacgaggccgccgcccgacaagttcgatctcatgtcgctcttggagcgcgaagagagttggcgtcgcgtagtcgactactcgcacaacctgtggtgtacgtgcggtaactggcagagccacgttgagattcaggacgaggagccaaactgcgagcagccggagcccgcacactggctggaatacgtggcggtccagtggcaggcccgggttcgcgattctcacgatcgctggtgtctctgcaacgcctggcgtgatcacgccttgcgcggccgttggggtacggcgtattcctcgggttcctcggcctcttcctccggtttcgtcgcggagagcaagttcacctggtggaaacgactgcgccacagtacccggcgctggttgtttcgccgccggcgagctcgatacactccgtctaactgtggggaaagtagcactagcagcggccagagtagcggtgacgagagtaactgcagtctacgcacccacggcgtgtacacacggggtgaacaacactaatcgataagtcgcgtgtaggcgactggctacatcaaccggatatctgcggggatttaaaaagacgacccgttgtcatccggcttagaccaaaccgtccttttatcatcttccgtcgccatggctatgtacacatccgaatccgaacgcgactggcgtcgtgtaatccacgactcgcacggcctgtggtgcgactgcggcgactggcgagagcacctctattgtgtgtacgacagccattttcagcgacgacccacgacccgagccgaacggagggccgccaattggcggcgacagatgcggcggttacaccgtttgtggtgtttttgtcaggactggaagtgtcacgcgttatacgccgagtgggacggcaaagaatccgacgacgagtcgtcggcgtcttcctcgggcgaagcgccagagcaacaggtccccgcttggaagaccgtgcgggccttctcgcgggcctaccaccaccgcattaaccggggtctgcggggcacgcccccaccgcgcaacttgccgggatacgagcacgcctccgagggctggcggttttgcagtcgacgggaacggcgagaggacgatcttcgcacgcgggctgagccggaccgcgtggtgttccagttagggggagtaccccctcgccgtcaccgggaaacttacgtgtaagaacacggcgtgacaataaacaacatagcgtaaatccccgtgtgatgtgtgtgattgacgttcgggaaacatgtccccatcatcagcgtcacaattgacgtgggttggtcactgacgtgcaggatgttacgcgagtcagagaatcgcataagaacggagtggtgagcgggttcccacaggagtctctggcgcaaaagcaccatgagcctcaggttccccgagagggtgggttacgagaaactgggataccgcccgcatgccaaacgcgtgcgggtgcatgactcgttgggattgacgcggtttatcatgaggcaactcatgatgtacccgctggtgttgccgttcacttttccgttttacgtgccgcggtcctagcacgtcagtggtgacgctgataattgcaacatggcccatgacgaacccgcttgggacgaacgtcaataccacgtcaaaccaccgtgacttggctgaacgttgaaacataaagccaaagcgccgtcggcacttggcttcagagcagcgcctcggggcgatgcgacggcgatgaacttagagcaactcatcaacgtccttggtctgctcgtctggattgccgctcgtgctgtcagccgcgttggtccgcatggctccggactcgtttatcgtgagcttcatgatttctacgggtatctgcagctggaccttctgggaccagtggtggcggggaatcgctcagtccggacctggagagagcaggcggaccgagccagagggaccttcgcttggcgttcaggccttaatactagccgcatcttacctgtcggcagcatgtatcggggctccgacgccttacccgccggcctgtatcgtcccgaagaagaggtgttcctcctcttgaatcgctgccatgggccactgtcaacgccgaaaaatgcttgtctggctgaggttggtgtcgctaatgccacttttttgtctcgcttcaatgtcggtgattttcacggagcgtcatgggaaaacggtaccgctcccgatggagagcccggggtatgctgaaattcctcttaaaatttcgtaaacgacgtcgtccagtcgttgtgccgcgattcgtacggttcatcgtctacgtcgttttgttcaccgtcgctgtgcaacgcgtgaaacaagagcgtgatgcgcaccttcggcggtatgaagaacgattacggaaaaaccgcgcacggcgtcggcagtcttttccgtgacttggggcgatgggtccgagctgcggtatgggtcacggcggcgtgtgttttattgacgaagatgccgatgtgtgactaaaaacgtcccagccccagagcgatatgtttcaataaaaaaaatatgtagtatcatattatgcgtgtcctggtttttcatttttggatgtatgtatcgcataaagggtggcgaggtgtgaggatgaaacatatgcagatacgcagtgttgttatccgaacgaaacccgtgtaatgcgtacaacggtacttcagtatgaaagtcccgtgtgtggggggggggggcaaatagttgcgtttgccgttgggcgtacgctacgtttgtatttctggctataatatgtgcggtcatgtgtcgatgttcctattgggaagggtgtgactgtagggtgtataaagtacggtgggacgcagagggacattgatagaaacaggttgagcgctgtacgagtttcacacgctgaatcggcgccaagaataaaacagtggttattcgtaaaagtatgggggggggggggatgttgtcgacggttgttagatgcattgcgtatctgtattagtagttttgcaagccgtggtgcgtgttattgtgacgtagcaattatcgtattgtgcatgtgtcgttcatcacagagtttagtatactaatatgaagcgtcgcgagtattaaagcaattggtgtctctgtgctagtctaacaacacctgtgtaatgcgtacaacgagaaaaaagacgcgaaagcaacgtgtatgggggggggggggaataatattgctaatcatgcgtcttgcagtacagatagccgctgtatcttacgcgtattgtcgcaacagttccacatcggtgtaattggatgtctggtacttatcactggcgtcgttataacattgtaaaacaagttttcgaaacataacgacagctgcaaaagaaaaccagtttattgagcattgtaatggtagtgtgtggctatattagaaaacgtgacgcgtcgcatgtcgcggcacaatctggcagcggggtcggggtagggtacggtgggaggcatgtacacagatggaacaaaagcagaagtaacgtgagaaggagcatacagtccagtatccagcggttcctgagtagcaccacccatcaactgaatgccctcatgagtaaaagtctgcgggcgacagcccttggggaccgttggcatgggacgatcaatctccaaaccacagcgtaacaccgttttcttccaacgtcgttgatagacgtcgtttttacggttactcccaagaacccagaaagtctcgtccaagtcgtaccaggaatcttctccggggagacgcgacggtttccaatcctcgtcgtctcgtctcaaagcacgtcccaaactggcttgaggagtcaacggtggttctgtgggtcgggtgtagcgcgagtgttttcccttcatgagcgattcatcctccttgcctttaggctttttggtctttttgtgtatcatctggccgccggcctccataaccaccgtggccaagtccagtcccagagcttgagcgtcggcgcggcgtcgggcgtcttgcaggtagtcttccacatttgcacagatggccgggtgtttggtggctagggtgaggacctcagcctcgccgcgacccggacgtagcaaaaaagccaactgcccgtgcggctcgcgcgcccacagcgcggcgcgcgggtgcaggtgcagcgcgtcccagcgcggccgctcccactgctcgcggtccagctcgggcagcagccgccgcgcggcctcggcggcgggcgccgactcgcgtcccagcgccagcgcgcccagcacgcccgcgcgcagaaagtgcgacagctccgccgccagcgggtacacgtgcccgtccagcgggcagtacccgaacacggcgcccagctcgtccagcagcaccaccagcatggcgcgcggcacggtccccgacgccgccggacccgccatcgctgtcgaacccaccatcaccgtcggcgccgctgctgctgccgcgtccgccccgaccaccgcgtgcgcgtccgcgttaggcacgcaaatcgcgcccccgccggcggcgccgtacggctgcggaggcacaggtacagcggaccccacggctcccgctatcgcgcacggcgcgtccccgccggcggcctccgtctccgtgccgctcgccgctggcggcgacgtcgtccccgccgccgtccccgtcgccggccccgccgcgcagcccagccaccgcgcgggcagcaccgcgcccagcgccagccagccgcagcacagacgctggttcaggtgccgacgcacggccgtcagcagcgacgcggggtgcggcgccgacgcgaacggctcgtactgcgccagctcctgccacgcgcccagcagtaccatcggctgcagtcgcctgcccggcgtctgcagcgccaccgtcgtgccggcccaccgccggcgcagctcccgtccgagcgccgtcgcctcctcggcgcgcagcaacgtctgtcggagcgccggctgaggcagcagcgtcgcgcgcggggtgcccacgcccagccggttgcagcggtacagccgcaccacctcgcccgcgccgtgccgaaaccactcgtccgcgtcgcgcgccgctaggatcagcgtgttgtttgccaggtcgtacacgaacacgcggaacccggcgcccagcgccaggtacagtccgtcctgcgcgcacagaccctcgggatggccggccttgtcgcccaacgtcgggtcggctgcggggtccacctcgtgcaccacggtagccaccagtacgatccacgcgtcccgcggcgacagttgacgcaggtccgtcgcgcccacgccgttcatctggctgcgcggcgtcacccgcgcgtagaatccgtacggccgtccgagcggcagcagcgtgcccgcgtcgcgctgcgaccacttgcgcatggcgcggcccgtgctgttggccaaaaacgccgcgcgccacacggcgcccatggcctggtattccagctccgtcagcgcctggcgctccaccggaatctgagacagcaacaggcgctccgggccgtgccaaaagttgctattgttgccgctactcggaggggcgcccggcggcccgcggggttctacccggtggacgccgtggcccggcgtcgtcgtagccgcagcactcgcaccagtgcccgctgtggacggcgctcccatcggcacacaagaagaaggaggagaggaaccaacccccgaaggccctccggccccgcggccgcgaccaaggggcggggggcgcggcgacatgccgttgcgctgggccatgggcgccggacacctccgacgtccactatataggaagcaaacccgcgtcagcgagcacgcggtttagacacgcggacgccttcgtcgcccgtgtgccgcgggcgacacgcagctggcttttataggcagcgacgtgcacggcgcgtgctggcgccgccttggcgccacgcagtctggaaggccgtggactgggaaaggcagctacccgaaggaagacgcgcggcaggcgcgtaccactggagcgcacagccgcctcccgggcgcgcacccatctaggtggacgcccgacatccattccgggccgcgtggtgggtcctcgaggggcgggggggtgtttttagcgggggggtgaaacttggagttgcgtgtgtggacggcgactagttgcgtgtggtgcggaggacggcgacggcgaataaaagcgacgtgcggcgcgcacggcgaaaagaagacgcgtgtctgtgtctgtgtgattccccggggaaaagaggaagttcccgggggacggcagcatgggtccctggggacacacgaaaagcaacgcccgggggcgagggacgacggccctggggaccgcgggggaaataacggccgcgaggccacacactcgttcctgcgaagccgcacaccccgaggccgcgcacaccgccgacacaccccgccaccacaccccgccggcacacccgccacacgcccgcgacacacccggcacgacacacccggcacacgcccgcgacacaccctgacacaccctgccaacacacccccgacacacccaacacacgcccgcgacacacccggcacacacccacccggccgcgccccgacacacccaaaacaccgccggtgcggggccgcgtggtgggtcctcgaggg

SEQ ID NO: 3 - DNA, 235645 bp, Human cytomegalovirus
ccattccgggccgtgtgctgggtccccgaggggcgggggggtgttttctgcgggggggtgaaatttggagttgcgtgtgtggacggcgacggcgactagttgcgtgtgctgcggtgggtacggcgacggcgaataaaagcgacgtgcggcgcgcacggcgaaaagcagacgcgcgtctgtgtctgtttgagtccccaggggacggcagcgcgggtccttggggacacacgcaaaacaacggccagacaagacgcgggcgcaagggaggagtcgcgggccccggggcacactgcacaacccgcgtcgaggacacacgcagacacggcccgccaacacaccccgacacacccctgacacaccccgccgacacacccggcacacgcccgcgacacacccggccaacacaccccgacacacccggcacacgcccgcgacacacccggccaacacaccccgacacacccggcacacgcccgcgacacacccgcggcacaccctgacacacccgccacacccggcacacacccaccccgccgcgcccccgacacaccccgaccgccgccggtgcgggacagggctaagcgcctttatggcgccgcaagcgctccgccgcttctgcggcttgctgtccacggcgctttctgcgcgctgccggtgcgtgtggctccacagcacttgtcgttccgccagtccgacactggacagggctgagggagtgttgcgtgacataagtaagcgcgtcggcgtcctcagcgcgtttgcggcgtgctgtgtccggcgctttgtgcgcactgccgttgcgtggcgtcccgcggtgttttttttcgcggaccagcgccggggacggggtgttgcgggcgctcgggggttggcggcgggtgtttctacggtgtttgtgcggcgtttctacgcagcttttgcgcagcgcttcgcttttcggggcggcgacggcgttgttttcgggcgtgctgggcgccggcgccggtaacgggagttacgctggggacagggacgggggttgcgccggggacggggggtgtgcggggacggggggtgtgcggggacggggggtgtgcggggacggggggtgtgcggggacggggcgtcgcgggatggcgggctgttgcgtgccggggacgggggactcttgcggcggggacggtggtgaggacggggacaggggcatttcgcggcggggacggggagttgcgggatggcgagctgttgcgtggcggggacgggggactcttgcggcggggacggggacgggggcctttcgcggcggacacggggaacacagacggcacgcacacgcagctcgcctatttaacctccacccactacaacacacacatgccgcacaatcatgccagccacagacacaaacagcacccacaccacgccgcttcacccagaggaccaacacacgttacccttacaccacagcaccacacaacctcatgtccaaacttcggacaaacacgccgacaaacaacaccgcacgcagatggagctcgacgccgcggactacgctgcttgcgcacaggcccgccaacacctctacggtcaaacacaaccccaactacacgcataccccaacgccaacccacaggaaagcgctcattttcgcacagagaatcaacatcaactcacaaatctacttcacaacataggcgagggcgcagcgctcggctaccccgtcccccgcgcggaaatccgccgcggcggtggcgactgggccgacagcgcaagcgacttcgacgccgactgctggtgcatgtggggacgcttcggaaccatgggccgccaacctgtcgtcaccttactgttggcgcgccaacgcgacggcctcgctgactggaacgtcgtacgctgccgcggaacaggctttcgcgcacacgattccgaggacggcgtctctgtctggcgtcagcacctggtttttttactcggaggccacggccgccgtgtacagttagaacgaccatccgcgggagaagcccaagctcgaggcctattgccacgcatccggatcacccccatctccacatctccacgcccaaaaccaccccagcccaccacatccaccgcatcgcacccacatgctacggctcggccagatcacacgctctttcctgtcccttctacaccctcagccacggttcacaatccccgaaactacgccgtccaacttcacgccgaaacgacccgcacatggcgctgggcacgacgcggtgaacgtggcgcgtggatgccggccgagacatttacgtgtcccaaggataaacgtccctggtagacggggtagggagatctaccagcccagggatcgcgtctttcgccgccacgctgcttcaccgatatccaataaacccatcccctcgccacgacgtctccgcgtatctttgtagcctcaggaatccgtccccacgtccacccatcccgagcactccacacgctataacagaccacgaacacggcaaaaaatgcatgcaaacttctcatttattgtgtctactactctgtgttgctacagggagtgaagggggtgaaggcaaagaaaaaaaaaaggaacaaaataatagattagcagaaggaataatccgtgcgaccgagcttgtgcttcttttcttataaggaggcaaatatactagggaaaacataagaataggaagaaaccgaggtttgggagaaaagctgagataaaatagcgcattttccatacagaggttgttgtttttgtggatcctaagaggtttcaagtgcgaatctcaaagttctcacgagaatattgtcttcaagaatcgacaactgtggtccaagatttttttttggtctttttaggttctgcgagggacatcacgatggatcgttgcgatgaagtcacgcgtacgcctctggtgtggcgcggtgtcgtgacaggagagtgtgttttcagtgcagagctgtcttgattcctatatccgagtatctgttttctcgtaaggacggtaatcttctttggtgtaagtacatctaaaagctgcaaactatattttaagggctgtctctaggtgtactttgatgctggagtttttcgctgtgttgatgtgaataaatctactactactattatatgcagaaagagtgattatgccgagacaagattgcattggctgaactgtttcaaaaacgcctacactctacttatccgtaaacctaaggtaatactatgtgtaagttgtttttttttctttttgtagtaaaatggtgatacgtgcaattaaaactgtattccatgtttccatcctttcatttcaactttaaaggcggctttgagagcgaagaagtgcgaggataaaaatggatgactccttcgtgtccagggagtcgactactgcaacgctgattgattaaaagatggtctccgatgatgatgttgttattgatcgaatcatggtgcagaacggcgacggagaggagcgtgtccgccgccgggaaggtggtctctttctcttttcttttttcaagaaatcttccatgtgtttatcgtagtgatcgaaatcgactgatctcgggttctttttgttggtttcttttcggttaatcatgtattgttttctttttttacagaaagatacttttttcatgagcaattcctcgcccggcgccggcatgccgaggtggggccactgcgatcagcggcatgccgacgccgacccggggatcttggattcaccgttttctctcttctctctctacatacagaccgggtggcaggagcggtaaggaatcatcgtcgtctttcattcttcgatgattatggtaatactaaatcttatctaggagcatatacatctaagattggagtactagtagtcgtttgtggtttctattttttttttatatttatctatgacagtttttctgtttttcgttttgataataatataataaaaactcatggacgtgaaatctggcttggttgtggtgatttcattctcattattgttgttttctttccgtcttgcggatgaagatgttgcgatgcggttgttgttggtgttgctatacaccgagagagatgatctttttgttcttctggttcatttcctatgattgtttggctgctgaccgacgcgtcaggatgtgcagggcatgcggggaatcaggaccggacacgggataatttcatctacctatacggagatcgcggtcctcgccatgaggatcgcgacaggcgcgtcgagggggcaggaacacccttgcggattgacattcttggtggtatttcgttgttgtcggtagttgttgttgacgatgaggataaataaaaatgaccttgtttttgttctgttttctcttgttgggaatcgtcgactttgaattcttcgagttatcggaaagctgaggtacccaaatgtctgtagcttttttctttttaccctcttgtttatcatctgcgattcgtggtaggtaggagagggaaatgataatccgagattaaggaaaggagaagataaaaaataaaaaaaaaaataaaacagaagccgaccggccgccgacccgttccccaggaccagcctacgaggaacggataacgcggtggcgacggcagcggtggtggcgctgggggtggcggtagtggtactgctgatggtagtcgggacggaggagagacgatgcatacatacacgcgtgcatgctgcatgggtggatggtccgaccgggagacgcggaagagaaactcacataaaaaggtgacaaaaagagcggttgaaaaaagaaaacgagattcgaccagacagaagagaaggaccggggcttggcgacccttccacgactgctgttgtcatctcggctcctccgtcttctcccggccacgggcggctaagtcaccgccgttctccccatccgtccgagcgccgaccgaccagccggccgattcgcccgccggggcttctggagaacgccggagcagcagcgatctggggaagccgctaaacccctgcgtttttatatggtagctctgccgagcgcgggctgacgcgttgagtaagcggaaagacgtgtgtgacgaaaaggggtcccatggtatttcacgtgacgatgaggagatgcggtttggagcacatacggtttaaaaaaagggagttgtcgtgacaagggctgagggacctctgtctccatgtgtgtataaaaagcaaggcacgttcataatgtaaaaaagaacacgttgtaaacaagctattgctgtatcattcggctgactatgcttcattcggactgattttcttttcctaacggcgtaacttaaagtgattaacgtatgatatttgttccccagagttatactatagtcatcatcctaaaattcagatataaatgaacacacgtcgtatgggattattaagaaaccgaaactctccacagttcaccatcttcttcgtcattcaaccgatgacccactccgtacaacgaatcagtctgctgcgtcatattgcaaagcacaagcgacgtatgcgaacaacttgaaacacaggctgttgtattgatgaccgttgtaccattattagtcacatcgtatagagactctccaccgtcatcccatgtttcccacccgatggaaaaccgtcttctatcatcaactgtggtaagatttcgaccctgcgaggtattcagtttcctcatatccataacctggattttatcattaaaccccaatattaaatacttttttagtaccccccacccaccaaaaaatgtgactggaccggttcctagcagctctgggagccatgttcaggttgaaccacagctacagcgaaaccgagtccagtgaccggtaaccacgtccagcccctgcgtatgtaccagtccaagcacgtccggtcattgttctacacaggaaatctaactaggtcaacgcaattttattccaccgttacgcagaatactaacaaaaaaacacacaaatttaacgaattacacgtagtttattacatgaaaactgtaagaacaccaattcactaagcgatacaacatttagctgacttccaagtgccacacatcaccactgtattcatccatgttttcaccgaaccaacgagacagatcgaagaagccagaatctcccgactttaaattacataaatccaacgtattatgaccacagctcgacacacaaatagttgcgttaccattcacagtagcattacctatacccgtaacgttgcacaaccactgatcaccattgttaccaaaaacggttttccacttagttgtcaacggatctttcctatgcgtaatggtaaaattactcccagtcgtcgcttttagctcattacgagtattatccgcatccacatatatcaacgtcatagctaggcacgctataagtaccccccccccacaatggaatgttgccaaaccggttctttcccgttatagccatagcgttcccaggcaaaagcaaacgccaaacctaatgcagtgaaaagcgcttgcagccagaaccagcttatgtaccagccacaatcacatccggttattgtttccacaggaaatcctaccaggcaaagccccgcttgttgtgttcctgaccatcttgtttagcaattcgtaaactgtcagcctagcgacgtccgtttagatcaaaagtcacgtatatagcgacgctgtttccacccgtttccccgtcccgccgtttccgaacaacccacccgggttcagacaaccgaccaccaacagaaatatacacacagaccaccgggagttcagttaaagatttcatcaggtttattttggctgctgctagtcttttgcttcttagaaaaaaaatacccatatagagaaataatgatagtttgacaacacatatggcagggatttcttcttcatcaataagatatgcaattcccccagggagagactttcaacaattgaatttacaaaaacaaaattacatcaggagaaagagaggatacattaataaatatattatatctggtgtatatactgaatgctgctggttcataaggtaacgatgctactttttttaattccaagatggtttttctttgttagtcttttgttgacttgctggttcctaaaagttcgcaaaaacgattgtgtgaagattttatgacgttggttgactagttcatgagattctgctgtacgtgtgatggttattcgctggttcgttctaagatgagtatcgtactgtgtctgcgatggtcgtctcttactggcattctctcggctgcctcttgctttcatgattgaaaaggaaaaaaggactccgagggcgcggtcatcttttacttttcggttttctcgttggcgggtcagaggtagtcagatcatgagactgtcgtggtcgatgaaactgtgtctgctcaagtgacgtccatttcttgtacggagaaaaaagtcatcgggataaataaggctatacaaggcgttgtcaagcgtgcggctctaaacaaattaagcgatacaaaattacagtaatacgaataataaattacccccctccccctgtggtcccccgagacgagagccacccatcgtgtactctcgcaccacccacgaccacagagggagacgggacgaagagacgacgcacagcgccatctcctcctggaggccggcgacgttaactgctacagctgcggcggcgaagacagctgcgatttgtcggccgacatgccgatggtatgggcggcggcggcagtggccgcggcagcggggaggagaggagagagaagaggagcggggcgtccgaaggcgaggatggcatggtctcgccggagcgcccggcttttatggaacactcgcgtccggttgggtatcacccacaggaagatgagtcacaacttccaaaccatcttgagacccgagtaacggtttacaggtcgcacgccagtctcagctaaaaacagcggacagtcccacgctgtttctgttgtggctctctccagtttcctcatcaccgtcccggtctccgtcgtcatcggaagaataccacccgctctcatgcggcagtcgatcggcctcgacgaacgagacgcggcgacgcctctccacggccgactggttgtggtggtgaaagaagagcaccagcaatcccaggaggagcaacaagccctcacatgtccaggaggtcggggagagggcctgtcggagatggccgtgaggcatcacgtacggcagctgaggagaaacggagaagaaaggaaaattaccgtcaggggccggggttcttattagagaaacagcacgtaggtcaggatccagatgctaatggcgatcatgatgacgatgatcatgcaggccaagacgcggcgcaccaatgccgaatccaagagccgccgtgccgccggttggtggctggcggcatctagagacatggtttgggggggaccggcggcgcgaaaagacagggagatggacagtgacacggtgttttgttatgattaggacatgggaaccggaagccgagacagagtactacagagtgttgaagggtaacgtgagggagatcatgtcatgggcgggctgaagaccgtgcgggaaggattgacgtgtgcggtgcttgtggaacacggtgttttaatatgtatccgcgtgtaatgcacgcggtgtgctttttagcactcggtttgataagctacgtggccgtttgcgccgaaaacacggttaccaccaactgtctcgtgaaagcagaaaatacccacctgacatgtaagtgcaatccgaataccacatctaataccaacaatggcagcaagtgccacgcgatgtgcaaatgcagggtcacagaacccattaccatgctaggcgcatactcggcctggggcgcgggctcgttcgtggccacgctgatagtcctgctggtggtcttcttcgtaatttacgcgcgcgaggaggagaaaaacaacacgggcaccgaggtagatcaatgtctggcctatcggagcctgacacgcaaaaagctggaacaacacgcggctaaaaagcagaacatctacgaacggattccataccggccctccagacagaacgacaactccccgttgatcgaaccgacgggcacagacgacgaagaggacgaggacgacgacgtctgataaggaaggcgagaacgtcttttgcaccatgcagacctacagcacccccctcacgcttatcatagtcacgtcgctgtttttgttcacaactcagggaagttcatcgaacgccgtcgaaccaaccaaaaaacccctaaagctcgccaactaccgcgccacctgcgaggaccgtacacgtactctggttaccaggcttaacactagccatcacagcgtagtctggcaacgttatgatatctacagcagatacatgcgtcgtatgccgccactttgcatcattacagacgcctataaagaaaccacgcatcagggtggcgcaactttcacgtgcacgcgccaaaatctcacgctgtacaatcttacggttaaagatacgggagtctacctcctgcaggatcagtataccggcgatgtcgaggctttctacctcatcatccacccacgcagcttctgccgagctttggaaacgcgtcgatgcttttatccgggaccagggagagttgtggttacggattcccaagaggcagaccgagcaattatctcggatttaaaacgccagtggtccggcctctcactccattgcgcctgggtttcgggactgatgatctttgttggtgcactggtcatctgctttctgcggtcgcaacgaatcggggaacaggacgctgaacagctgcggacggacctggatacggaacctctgttgttgacggtggacggagatttggaataaaagatgcgtgttgaccgtcaaaaacgcaacaacttcacgtatcgacaaacggtatatataatcctgaccttctacattgtatataggggcaaatgtaacagcactgataccaataattctacgtctacttcagatagcaccgtctctgatactagtgtgtactctactccaaatcttcccagtacattttttacaactcttgatacatctactggctcacagatatcaaccacctcaaacaccatatccagcactacaaatacattggccgcatcttctataactacgttaaacacctcgactaacactacgtcttatacagcttcaactcttactgctctctccagtacccacacaaattccccaatactctccaacaacgcaacattatacaccacatcgttggataatacgactacagacataacgtccagcgaaagttcgattaacgcgtcaaccattcataacactacgtacagtcctgtaacatcgattgctgttaattgtactgtcgcagctaatgaaacaaacaattcaagttcaaaaaattgccaacaagatattggaacaatacgtgttaaatcaactacattaacggcagaagaaggaaaaaacattacgatacagggcaattcaacatggaactgccccaatgtagtttggtaccgacattacaattggtctacacatggacaccacatttatcccaatagacgttaccaaacgccaacgtatcaacacaagatcttaacatcacatcccatatgtcatcctgacgtctcatcacctgcggcgtaccacgatctatgccgttcgtgtaataagacagaactacgtatatacgatttaaacactacaaattcaggcagatatagtcgacggtgttacaaagagtacaaccacgatggaccacacgaggatgaaaatttcggactaactgtaaatcccagaaacgacactgacaatcataccaccccactatgtcccagatacgtaggaacacaatcagaagaagacgaagacgacgattatacactaagcactatcacaaataataacatgcgcaaaacaagtcaccgtgacatctcacatggcacgcgcactacatgggctcttacactaatctgcatagcctgcatacttctgttttttgttcgacgagccctcaataaaagataccgtccattacgggacgatattagtgaatctagctttgttgtacgatatcatcctgaacatgaagactgacgtttccggacacgcaacacatgaaattaagtaacatatctaccatgaaatacagcaaagatatactaatgtctatccatccaatagcggtaccatgcactggcatcttgcgattacatggacggtaatcatattaacgttttcggaatgttacaaccaaacttgtccgtgcccctgcatttgtgtcaattctacaacagttagcatatccaccagtgaaacaacgtctaaaaacatcactccaactaccacgacaaattccaaaaaaacaacgtcaagtattgctaccactacaccctcgttagtaacgactggcaaagtcgtttctactgcagcgtcgtcaaccataatatctcaaaccaaccgcagtcatacgagtaatgctatcacaaccccgaaaacgcgatttgaatataatatcacgggatatgttggccaagaagtgactctaaacttcactggatcatggaattacattcaatggttccggtacggttctccaggctggctttattcctcggaaccaatatgcaccgttaccagcaattatcatcatactttccctcgtggtgctctttgctttgattgtgacatgacaaaacttctaatttacgatctgacgttaaacgattctggaaagtacgttgtcaagagaacgcgccatgacaatcaatacgaagaagcatgctacagcctcacggtgatttttgccaacacgacatccatagtcaccaacagaacgtgtgatagaaaacgaacagaaaatacagacactactaaccatgaaatcgggaaacatattattgaaactattaagaaagccaacattcctctgggaattcacgctgtatgggcgggtatagtagtatcggtggcactcatagcgctatatatgggcaaccgtcgcagacccaggaaaccgcgttataccagacttcctaaatacgatccagatgagtcttggactaaaacctaatatgcacatcaataaaattttttatctttagtcattaatgtttgggtgtgtttattctgagttaatcacttataagtcgggatatccatagacatttaaaaacatgggtgtacaatgtaacagtaaactgctgctactagccgtactaataacaattatcctatctagcattctggtacaggcaattccacataaacaaaaaacatcctaccagcagctcttgctgcaaagtgaacatgtacaaatacccatcacagtagccgaaggagatacaatttgctttaacgttagtgataacccctgcaacttttctagttactggaatcacaataactgcgaactttgcggttggacaccattttactcggaatatgctggatattccgaaaacaagtcgtgtcacccacgatttacctgtcttcacgatactaaaggtctgaaactacacaacgtaactacaaatgattcaggaatttatacccgaaacgtttattactgtgacattccatgcaacatcagcgatgatcataaacataacgtagaggactttgacaactgtaacaccactataaatagaactcactatattattactgtctcgtcttcacgttattctaaacgcaccaattcccacgtagccactcacgttggttggacagccaccgtggtgataattatctgcgttttaacttacgttaacgttacaacaaccctgaagcacagactacgaactagaaacaacgtcaaccacacaatgtgatcacaaagtaccaacgctaatttatttagggtacatttgtactactttgtgtagttctcaaaaactgtaaggtcccgcttttccactccgtcatgaaggatcgcaataaaatacttctatgtatcatctttatttgcatcatgtgcctcatttgtatttactttaaacgtcattgtattcctactccgtctccggacaaggcggatttccgagtagaatttccttcgttactcccgtgtatcggcgtacagtgcgctgcatagaaagacgcgtgacacataccgtacccctggacggtacagtctatgataacgtaattcaaataaagtacaggttcctagtgacatgttatcataaaacatagatttttctacgtgtttttacaaaagagcgtctcgaagcagcttgagccacactgcggtccaaatgacaagcatgatcaaaaatatgctgcgtagcagtcgaaagccgtactgagcgtgcgaggcgggtaggctgccgaacgacggatatgcgtcgtcatcttcgactataaggatcgtgaccgagtcttcggccatgctaaacgctaccctgtgtggctggtatgtagtgtatccggtttggaattgttctgttccggctcgggggatagtgaggaattctcaagggacaatacgggacccaatgactggatatgagaagggtttttccccgtaagatgatcctggtatcacatgaggtctggatatgtataaatgaggagtgaaataggtaaagggaatcagatgccgccttcgtgatgcagccgctggttctctcggcgaagaaactgtcgtctctactgatttgcaaatacatcccgccttaagcgataagtccataaaacgccgttgtccggatacggtgaaggtgacccggattatagcacgttcctttttttttgtttttgcatcacttatcgccactatcagtgcaatattttgattgtgagactgaaagagtatcgttatgatgcttagaacgtggatatcattaccgatggtactgcttgacgcgtactgtttttgtatttttgtgagttgttcaatcagcacgacgactgctcccgtggaatggaagtctcccgaccgtcagattcctatgaatattacttgcgctaattactcagggaccgtcaacggcaacgttacatttcgaggtcttcagaacaaaacggaagattttttgcactggctgttagggtggggtcataagtccatttgttcattttttccgaaactccaaggcaataaagaacaacattatatgtatggaataacgaatctcacgtataactgtacctatgaccgcctgacgttgctgaatttgacgacggaaaacagcggaaagtattatttcaaacgagaagatgtgaattccaccttttattactcttgttacaacctgaccgtgacctaaacgcatgtaaagttccacagagccgcgtggctgtagctattgtgtttacgttgcttttgaaatgttaagcgtccctacggcgctaacatgtttctaggctactctgactgtgtagatcccggccttgctgtgtatcgtgtatctagatcacgtttaaagctcatgttgtcttttgtgtggttggtcggtttgcgtttccatgattgtgccgcgttcgagtcctgctgttacgacatcaccgaggcggagagtaacaaggctatatcaagggacgaagcagcattcacctccagcgtgagcacccgtacaccgtccctggcgatcgcgcctcctcctgaccgatcgatgctgttgtcgcgagaggaagaactcgttccgtggagtcgtctcatcatcactaagcagttctacggaggcctgattttccacaccacctgggtcaccggcttcgtcctgttaggactcttgacgcttttcgccagcctgtttcgcgtaccgcaatccatctgtcgtttctgcatagaccgtctccgggacatcgcccgtcctctgaaataccgctatcaacgtcttgtcgctaccgtgtagctagttagccagctgtgtgtagttgtattttgcttttgcatatttgttttcagtcagagagtctgaaacggggtgggagggacttttgcgggtagtgcatgctaagatgaacggatgggctggggtgtgcttgataactcactgtttgaatacgcgctcacgcacatatgtagcactcaacatgttagcttttgcccgcacgccccggggcgtgccgagctgcctttttaataaagtctgggtttccagatacgcgctggttctgattttgatggtttgtgcctctgaaagctctacgagctgggccgtgacatccaatggactgcctaactgtagcacggtaactagaacagcgggtcaagacgctgaattgcacggtccggcaccgttaagctgtaatgtgacccagtggggacgttacgagaatggaagcacacccgtattatggtgcactttacggggatcacgcatgcgagtctcattaggacaccgtgtagcgtttggctgttcttggaaaacattttttatttataacgtttctgaaagtagcggtggcacttactatcaaaaaggttacaactgcaccgacaaacatataacactatcttgtttcaacctaacggtggttcctcgagcggttcaaagcacaaccaccgtaatgacacccacgctggttacaaactccacattcagtgtgtcacttgttgcgttgagactgacgacaaattccagcgcgtttggacacgctatttatcaacgacaacagcgtgttgaaaacgggacgttatccaagaacataactaacttggcattcacctatggcagctggggcgttgcgatgctgctgtttgccgccgtgatggtgctcgttgatttgggtttgcctcaatcggcttggcgacgctggcgaagccacgtggacgatgaagaacgtggtttgttaatgtaggaaataaaaggcagtttgagcatgactgtttccaaaccgtaacgtggtaaataaatcatggcttctgacgtgggttctcatcctctgacggttacacgattccgctgcagagtgcattatgtgtacaataaactgttgattttaactttgtttgcccccgtgattctggaatccgtcatctacgtgtccgggccacagggagggaacgttaccctggtatccaacttcacttcaaacatcagcgcacggtggtttcgctgggacggcaacgatagccatctcatttgcttttacaaacgtggagagggtctttctacgccctatgtgggtttaagcctaagttgtgcggctaaccaaatcaccatcttcaacctcacgttgaacgactccggtcgttacggagcagaaggttttacgagaagcggcgaaaatgaaacgttcctgtggtataatttgaccgtgaaacctaaacctttggaaactactccagctagtaacgtaacaaccatcgtcacgacgacatcgacggtgaccgatgcgaaaagtaacgttacagggaacgtcagtttagcaccacaactacgtgccgtcgctggattctcccatcagacgcctttggaaaacaacacgcacctggccttggtaggtgttgttgtgtttttagttctgatagttgtttgtattatggggtggtggaagttgttgtgtagtaaatcagagttatagtaatgtcctttttatcagggagaaggttttgttcccacaatgactagctcgagactatctgcgtcggaaaattatgacggaaattatgaattcacggaaactgccaatacaacgcgtacaaataccagtgactggataacgttaggaagcagtgcatcgctgttgaaaagcacggagactgcagtcaacctcagcaacgcgactacggtcatcccacaacctgtagaatacccggctgggggagtacaatatcaaagagcggcaacgcattattcttggatgctaatcattgtcatcattctcatcatttttattatcatctgtctacgagcacctcgaaaaatctaccatcactggaaagacagtaaacagtacggacaagtgtttatgacagacacggaactgtgacagtgatgtctaagcgtttgcaggtatttccatggataacaattttattttacacatcaaaatcccagtattggaactatatgacaataccatgtacccctacagttggatacggcagtcataatattagcttgcatccgcttaataactcattatttcaagacgatgtttttgaatggtacatagacaaaccaatggttactaacaagttatgtctttatcaaagtaatgaacgcataaaatccaatctagactctccaaatattatgtggcagtgcacagataatcgtacactaattctcatgaacttaaccacaacatacagtagaaactattattttcaatcttttaaatatctcggacaaggagtaccaaaaccgaataacttgtgttataacgttagtgtacactttacccaccaaacacattgccatacaactacatcatccctgtatccacctacatctgtacacgattcattagaaatatcacagtcattcacctcaaccaacttcacacataccgcggtccactacgccgccggtaacgttgaagcacaacacgacactgccacttcacatacaatgtggatcatacccctagttatcgttataacaatcatcgttttaatttgtttcaagttcccccaaaaagcttggaataaattcacacaataccgatacagcggtatgctcgccgccgcttaaagaatcaacgccaaggaaatcaaaacgtaaaaagaatagatatgtacgtttatttttcagctcactgtttgaataccgtaaacataatgacgtacatatacgtggttatacaacaggtgtttgtgttatgcggcaactgattaaccatatcgtgaaccatgatcttttccgatggtccgtcgtgaccgcaatgatattttacagatattccgaaacctgtatggaggtcactgtcagagtaggtgatccagttaccctcggtagtggacatggttatcatccaggacaaaaagtacactggtataaccagtcatgcgtcggcatcggcaacggcgaaaatacgcatcctatctgcacctacgaccctcctaaacctggtagacaaaagacaatgaaaactactccgttgccatcaccattgttgtacgagtgtcacaattccacattaagcattcttcatgtaaacgtctcagatcccagaaactattgcaggcgaaaatgtccaccaaagggtaactgtgagtttcccacatgttttacattatcgctgatttctagaactacgaccagaaaacccgaacaaaaaactacgttgttgcgattaaaaaccacgccaaataaacatacgcagcacaaaagatccacgcggagaacgtcacctaaagattacaatgtaacgggtcttccaaaaggctttgcggactcgtttaccggtaacgtagaggcacatcgaaccaaagatgccgcacacagcgcatggattctcattatcatcatcattatcatagtcgtcattctattcttcttcaagattcctcaaagactccgagagaaatgggacaccaagggatacctttacaaaggaaccgatggcctgcccactacggactaattatcgtgagcggacggatatgttcggtttcaaactcactgtttgaatatagggacagtccctacggaacctgagaacatgtggaaatcacctgtggtagaatgctgttcaggtacattacctttcatcgcgaaaaggtactttacctaacggctgcatgcatctttggtgtctacatcagcctccacgatgcctgcataccggtggtcggcaaaataggtaccaacgttacgttaaacgcggtagatgttcttccccctcgcgatcaagttcgttggtcatacggtccaggtgggcaaggctacatgttatgcattttcactggcacatcaacaacaacatttaacaatacgcgctttaatttttcatgtctaagcaattacagccttctcctcattaacgttaccacgcagtatagcaccacctatcgtactatgacatcactagaccattggcttcaccaacgacataaccatggttctcgatggactttagacacatgttacaatctgacagtgaacgaaaacggtacattccccactaccaccaccaaaaagcccactacgactacgagaacgacaactaccacaacacaaagaacaaccaccacgagaacaaccaccaccgccaagaagacgacgataagcactacccatcataaacaccccagtcccaaaaaatccaccacccctaacagtcacgtagaacatcacgttggttttgaagccacagcagcggaaacaccgttacaaccaagcccacagcaccaacacttggctacacacgccctctgggttttagcggtcgtaatcgttattatcatcattatcattttctactttcgaataccgcaaaagctgtggctgctctggcagcatgacaagcacggcatcgtgctcatcccccaaaccgatctgtaagcaagtcgcgtaggaaatgattgcatgaaatcactgtgaaacgccaactccgtgccagctggcgcggcggacaggcctttgacgtatttgaagccaggcgcgctctcgataccgaaaggatccaagggggctttccaaagccgacgtccctgattcccttcataaagctgttgaccggccctagaaagaccaagagcatgctgtgggcccactgcggtcgcttcttgcgttatcatctgctcccgctgctactgtgtagactgccattcttactcttttttcagcggccgcagtgggcccacggcttggacattgtcgaggaggacgagtggctacgggagatacaaggagcgacgtaccagctgtccatagtacgccaagctatgcagcacgccggattccaagtcagagcggcgtcggttatgacacggcgaaacgccgttgacctggaccgaccgccgctttggtctggatcgctcccgcatttgcccgtctacgatgtgcgttccccgcggccgttgagaccgccgtcatcacagcatcacgccgtatcacccgaactgccgtcgcgaaacgggatacgttggcagtaccaagagctgcagtatctggtggaagaacaacggcggcgaaatcagtcgcgtaatgcgattccgagaccctcgttcccccctccggatccaccatcgcagccggcagaggatgcacgagacgcggacgcagaacgtgccgaatcaccacacactgcagaaagcaccgtcagccacgacgcgagtgacaacgcagtgcggcgacggcacgaaagacggcgctataacgctctgacggtccgcagcagggactcgctgctcctaacgcgaatacgcttctccaaccaacggtgtttcggacgcgggcgtctgagacatcccgcgggaagcggtcccaacaccggcggaccgcgacccggcggtgcgggactccgtcaactacgccaacaactgacggtccgctggcagctgttccgcctacggtgccacggttggacacagcaagtctctagccagatcagaacccgctgggaggaaagcaacgtcgtgagccagacggccacgcgagtacgtacgtggtttgtgcaaagaaccacgttgtggcgtcgcacgtgggttccgggacagaacccggcggccgaagcgcaagaactggcgatcataccgccggcacccacggtgctccggcagaacgaggaaccacgtcaacagcttacgggagaggagacaagaaattcaacgcacactcaacgtgaagaagtggaggacgtttcgagagagggcgcgagagaagggaatgatgggagccgagcaagtggaaacgacgagagaaggaataatgcgggaagatatgatgatgatcatgaggttcaagagccgcaggtcacttatccagcgggacaaggagaactgaataggaggtcacaggaggagaacgaggaaggtggaccgtgtgaatcgccgccaatgacgacaaatacgctgaccgtggcctgtccgccccgcgaacccccgcatcgtgccctgtttcgtctatgcttaggactgtgggtctcgagctacctggttcgacggcccatgacgatttagaatacaccgagccattcctttatttccccccatccccggtcgcttatgcgtgtcaaacactaccaataaagataatctgccaatcgcaccttatatataatatgtggtcgcgtgtggtctttttaaggagctctgaaacacagacaggtatggggggtggccggctgccgccgctgtggctgccgctgctgatcgcctggagcgagtggggcaactgctgtctcgatgcgcctccggtggtgcgttcgccctgtctgcagccggtgcgcgaccgcaaccgcgagcggaacccgggctcaccgcagttgctgccttacggcgaccgtctggaggtggcctgcatcttccccgcgcacgactggccagaggtctctatccgagtccacctctgctactggcccgagatcgtgcgttcgctggtggtggacgcacgcagcggtcaggtgttacacaacgacgccagctgttacatcgccggcgggcgctggcgtttcgaggacggcggcgcggcgcagcggctgagcctctcgtttcgtctcatcaccgagaccgcgggcacctacacctgcgtgctgggcaacgagacccacagcctggcgaccgagaccacggcgctggtggccgacgtgcacgacctgcgccactcggaccgctcctgcgacctggctttcggatcgcgctcacagacgcggtacctgtggacgcccgatccctccaggttgcgcagtataaactgcggttgggagggtgaacggcaccgcgtagtccactacatccccggcacctcgggtctgctgccctcgtgcgaggaggacgagcgcgaactgtgcgtgcccttcatcagccagagcatcgcggacaacaactgcagccgccggcatcgggtagacggcgctaggcggcgctatcatctgcggagggattactggctgacggatccgaagatcgggctgctggccgcgggatcggtggccctgacctccctctgccacctgctgtgctactggtgttccgaatcgtaccggcgtctgaacaccgaagaggaaaacgaggcggcggaggaaactgccgcgggagaagcctctgcggtagcggcggcggccgtctctgaggaagagcagcagcgggagtaaacgaggagagccatgaagcggatgattcgcagtcacggcaggaaaacggagtgtcagatgacgggcgccggcgagcgacgcggctccgccgtcggtgcgctcatctgcggcagcggtacccgacgcggcagcggcgccaacgaacgccgcgactccgacgtcggtcccatcgcccacagtagcggtaccagacgcggttcggcgaatgaaacgtccgcctgtacgcggaccgatcaccagaaggcggacattgggctgtggttcatgtttctggtttttggactgtgttcgtggttggcgatgcggtatcgcgcacaataaattttgaatcgatgtcaaggaacgcgtgttttgtattttattgggaatattggcggggacaaaccggtttcggatgtttacccttaatcttaccggggacctcgttgtcctctcctccttcttcctcggacacggggcttcatgctgacgtaggtaccgactggggtcaaaagcctgggtacttatggggagcgcgcacaaaggaccgtcaggcgccggcatggagcgtcgccgaggtacggtaccgctgggatgggtgttttttgttctttgcttatctgcctcttccccgtgtgctgttgatctgggtagcaagtcctccaactcgacctgccgcttgaatgtgactgagttggcctcgatccatcctggggaaacgtggacgttacacgggatgtgtatttctatctgctactacgagaatgtgaccgaggacgagataatcggcgtggcttttacttggcagcataacgagtctgtggttgacctgtggttgtaccagaacgacacggtgatccgcaatttcagcgacatcaccactaacatcttgcaagacggactgaaaatgcgaaccgtccctgtgactaaactgtacaccagccgcatggtcactaatcttaccgtgggccgctatgactgtttacgctgcgagaacggtacgatgaaaataatcgagcgcctctacgtccgattgggctcgctatatccgagaccgcccggatccgggctcgccaaacacccctccgtaagcgccgacgaggaactgtccgcgaccttggcgagagacatcgtgttggtctcagccatcactctgttcttcttcttgttggccctacggatcccccagcgactgtgtcagcggctgcgcattcgcctgccgcatcgataccagcggttacgcaccgaggactgaacggataaccgcaaaggccacgtgcaacgttcacgctgctataagaaggccatgtcccccgtggacgggtctctttgacacgagcgcggcacgccgttgccacgagcatggatcacgcgctcttcacacacttcgtcggccgaccccgtcactgtcggttggaaatgttgattctggacgaacaggtgtctaagagatcctgggacaccacggtttaccacaggcgccgcaaacatctacctcgacgtcgcgctccgtgcggcccccagaggcccgccgagattcccaaaagaagaaaaaaggcggccgtccttctattttggcacgatttgtgctggctgtttcgacgacttttctttcctcgggaggactcagagccactgatgtcggatccggcacggtctcccgaagaggaggagtaaacaacacacggctaagaggatacatcatcaaagaagataggaggggtcaaaacgcggactgaaagtatataacgccgatcatgttcgaggaactgttaataaaacgccatgatgacaatgtggtgtctgacgttgtttgtgctgtggatgttgagagtggtgggaatgcacgtgttgcgttacgggtacacggggattttcgatgatacatcgcatatgacgttgaccgttgtggggatttttgacgggcaacacttttttacctatcacgttaattccagcgataaagcgtcaagtcgggccaacggtaccatttcttggatggctaacgtctcggcggcctaccccacctacctggacggggaaagagccaaaggtgaccttatttttaaccaaaccgagcaaaacctgttagagctggaaattgcgttgggttaccggtcacagagcgtgctgacgtggacgcacgagtgtaataccacggaaaacggtagttttgtagccggttacgagggatttgggtgggacggggaaactttaatggagctcaaggataacctgacactatggacgggccccaattacgaaattagttggttgaagcaaaacaaaacgtacatcgacggtaaaattaaaaacatcagcgagggggatactacaatacaaaggaactatctcaagggtaattgcactcaatggtccgtcatttatagcgggtttcaaacccccgtcacccacccagtggtaaagggcggtgtccgaaaccagaatgacaacagagctgaagcattctgtacatcttacgggttctttccaggggaaattaatattacttttatccattacggtaataaggcgcccgatgatagcgagcctcaatgcaatccgctacttcccaccttcgatgggactttccatcagggatgttacgtagccatcttttgcaatcaaaactacacctgccgcgttacacacggtaattggacggtggaaatccccatcagcgttacctcacctgacgacagttcctcgggggaggtccctgatcacccgacagctaacaaacgctataacaccatgaccatcagcagtgtcctcctagccctgcttttatgcgctttgctattcgcgttcctgcactactttaccaccttgaaacaatacctacgtaacctggcctttgcgtggcgctatcgcaaggtccggtcgtcatgaccagcaacgccctgtatgagctgtttcgacgtcggttaccgcgtgcccccgtcaacacggtcatgtttctcacgcgacgcactcgtgatgggttctgcggtcggttgacgtccatcgccacgaattcccactacactatgttcgtgttagatcacggatccgtgcgcatcgagcgaccgagtcagtcagaagtggattgcgccagtttaatggaaacgctgaagcggattcggttacgaaattcgtgggtagcgtcagaagacgagctagatgtgagtcgcagggacgcgtgacacgaaacgcgttcaggattaacgtaggttttcgaaataacctacgtccgtgagtgacgcggtttcgtgttgaaacccgcgcccgcttctcacggcggtttatgatgaaaccggcgttgcggatccacgcgggttcctcattcaacctgcgaaaagaggaagttgcggtaaaaccacgtcaataaagacgtcaatgacacctcaatgttgcgttggaacggtctttatatatacaaacgccgttatgatcagtgtccggcaagatgctcgggatacgggctatgctggtgatgctggattactactggatacagttgataacgaacaatggcactcgaagcaacaataccgataccatctttgtatctctccttaccgggcccaacggagttactcgcacagccatcggaggtctgtattcaaactacaccaacttaactggagcatttggcttcacttcaacaaatatgtcagcaaccaactcttccgctgaggataattggagcgtaaccaacctgacggagagttgcatcaaccgcggtgagtcctatgtgactaccatctggcttctggactgcactaaaaacgatacttattggtactatggaaatgcctacaatcatacatgtgaaggtacaatttcgggatatctcctgggcatgtgcaagctatggaaaagttgggtcaataatattacttcttataacactgtcagagtcgaatcgctgggaaatgaaacacggtgcatgctgctccctagacagtatactctcaacgccacggtggaatggtacaacaaatctgaaggtgacgtaccagaagaattcatggactatgttatcctgacccccttggctgtgcttacatgcggactgcaggaagcttatatactcgacaaaggtcgtagatacatgtatttgttttccgtgtcctgcgtgggaatcacaggtaccgtatctattatactcgtctccctatcgctgctcatcctcatctgttactatcgctgtggccggcttctgatatgcccacgcggctttgaactcttgccagaattcactgaggaagaggaggaaaaagaaaaattgttaacgcataatgacattgaagtccaagtgcctattcgcacgcggcgactactcgtcccttggatccgggagagcaaaatgtgggtactaccacccccgttgcctccacgacctccccacttaatagaattcccgccgtctcctccgccatcgcctgggcccatgcacatggtggtctgcatgccagcatgacgaactttggactctgagccccaagcggtacgaactacatattttccataaatctacactgaacttgagcacaaagatactgacaatagactggatatacagacttttatatgatccctgtacagatgtaaataaaatgcttttatttaaaactggtcccaatgttcttcgggaatcatggggtggggacgggggacgcggtagggagcaaaaccgggtacatgggggggaacatcgtccagcagtagcaccagcggattgggtaggggttgctgcggaggtcggtcgatgacgatgtcgatctccatcggcagatccggcaacatctcttcatctccctcaccgaccagcactcggcgctgttctggatgtatatgattctggaaaagcctccgacgagctcgcggcgcgtagaaagccaagcggcgcaagggccggcgagcccgaaagtccatgcgcacagatggcatgagtccttgagtgacggtggtgagctggggaacagggctacctcccatcgcgacggtgacagtggatccatgagagaggcgccgcacgctgcatggctaaataccgtgaatcccctgacgtcgtctttcgtcccgaacgcgtcatgttgggggcgaggcgtaaaccgtcgaggttgaaaaaccgcgtatctgcgacccgtccggactacgttgttttttagaagcggccacatgacctcgagatgtcgtcacccaaggtatttaacggcacacagccagacgcgttcgtcagcagcgacgccgacaagacctcagcatggctcggaggctatggatcttgagcttactagccgtgaccttgacggtggctttggcggcaccttctcagaaatcgaagcgcaggtaaacggaatctggggaattcaacacaggtaagaaatacaaaaaaataacgtgattgtgaacgcggttatcgtgttttgcagcgtgacggtggaacaacccagtaccagcactaactccgatggtaataccacccccagcaagaacgtaactctcagtcagggggggtccaccaccgacggagatgaagattactccgggggagactatgacgttttgattacggatacagatggaggtaaccatcagcaaccacaagagaagaccgacgaacacaagggagaacacaccaaagaaaatgaaaagacccagtagcagcagcagatcccaagggttaaagaccatgttgactattttgttttttattaaaaagctgtaaggttttgctctaaaaacaccccgcctccggtcttttttcttttgtattcggcacgcgaaacacggtttcttcccatagcctgtctaactagccttcccgtgagagtttatgaacatgtatctcaccagaatgctagtttgtagaggctatgcgggatgctgcggcggcgcgaccttccctctccacccagccccgtcaaaacacacgcgactcgagcggttcgtatgaaaaataaaaaacagctttttatttacaggaacggggaaaaaaaaaggcacacggtccgtgggagacgcgggttcacgcgtcgtcaaaaagttggtggtccactccgtaaggacaggtaggcttatttagcttccgcatgctcctggttccgtaataaatgccgttttcgtggcagcgtgtcatgccgcgagtcacaaactccatcaaactgtcggccacgatgcaaacgtgctgattgttggcagcaaagacgcgcatacagtcgtccacgaagaggttgatcacgtcgtaggggctcaccaaccagcctaaaggttccacgtggttactgccgaccatgaccctccagtcgttaatctcgctccagtcgtacagccgaatcgtggagacgcgaatgacgctgtaatcacccatgaccatgagtcggccgcgatacgtagcacgccactgcgcgaacgcgtggatgtgcatgcagccggccagcgctctaagcgaggcggtgtgcggcagctcctctgggacggtgatgaagttgcagcgtcgcaaaccgatgttgagaaattcagtgatgctctcggccacaaaggtcaacgagtcagagtagatgtggtcggtccataggtacatggcgcccgaggcgcccaggtacagttcagacggcacgttgtgatcgcccttgtgtttaagaaagttgtaggtgcagatgctgccgacgaaacgcagcggctcggggcagcagaggtagctggccagacgctgtgcatcccgtccttcgtcgcgcaccaagcgccagcgacgccggataacgaggcagcggtctttgggccagaccagggccacgcgttgcccgggtttccacggtcgcgacgtcttaggaggcctccagcggtcgagcagattgagaaaacagtccttgattaccgacatcgcggtcgcgcgtcggtggacaaaaagaaatcgggccgatccggaaaaaaaaaacgacggcaaaacaccgccgtgctcgagcgaagggtggcggagggccagaagaggcggccttgacggcgttggcagcgaaaaaattggcacgcgagtcaaacgggaagtagcgtcggtgttttatgccccaagcagcgtcgtcgtcactcgtggcgtcacagtcaacggtgctgacgtcctttggggcagtcgggcacgcgatcgtagatgccgttgtggccgctgaaacgtcggttttcaaacagcaggttaagtcccagacacatgaacgtgttgagattatctcccacccggatgtagcggtcgtcgcgcacgtcgcaggcgtagacggccccggtataggcgacgacgatggggataaggtcgacgggccagcgcaagtgaggaaagggcgcgttctcgcccttgaggctgacggttcccaggccgagaacgcgcattccgaaagcggttttgatgttgcgcagcaagtgaccgccttccacgctgttttcgaaacacctgaggttgcatagacgcagttccgttcccggcgggtacgtcaacggcatgaactgcccgtggtggcggatgatgaatcgcgccatggtatccaaaccgaggctccaggcgcgcaacagcgggcgaaagtagcgcttaaccaacgacgaggtcaggtagcgcatgcagtgcagggtctcgacggcgcgcagcccgacgcgcgcaaactccatgaggttgcgggccaggtagtagacggcggtgtcctcgcgtacatagcaaaaaacatagccctcgtccgagatgaggcacacagcggtcttcttctgctgatccggcgacaacacgccctcgttcacgaagcgacccacgaaggccaggcgcgtctggcaacacaggtagtgactccaagccttcacgtcctccggtttgaagtcctcgtccgtctcgatctcctgcagcactaggttccagcccggcggccagaccacgggcaacacctggcctgcgttgatgcgcacgtaagcttccagacagcccaggccgaactcggccgtgagcgccaggctagccagatcgctcatgtgacgcgccgagtcagtgggcgagcccgggggcccgtcgcacaccacgctccgtcttcttgtcctcaccgcggccagcgtggcgaggacactttccgcgcccgaggctgtatcttcggtttgcccgccggagccggccctcactatataacgtcccgcccgggtctcctccatgtatgcaggtaagcaactgagccgaacgcacctcagcagacgagaggatgtcgtcgcggcgtcgcagctcgtcacgtcgctctggcgaaccctcgacggtgatttatatcccctcgagcaacgaggacacgccggcggatgaggaggcggaggacagcgttttcacgagcacgcgggcgcgcagcgccacggaagatctggatcgcatggaggccggtttgtcgccctacagcgtctcctcggacgctccgtcgtccttcgagctcgtgcgcgagaccggcggcaccggcgccgccaagaaaccgagcgaaaagaaacgatcgtcgtcgcgtcggcaaccgcagatcgcagcgggcgcgcctcggggctcgccggcgacacccaaggccggcaagtcgcctaaagtctcgcgaccgcctagtgtgccctcgctgcccgagaacggcgccggcggcggtggcgacgataacagcagcagcggcggtagcagcagtcgcaccaccagtaacagtagcagaagtaccagtcccgtggcgccaggtgagccgtccgctgccgagggcgatgagttttccttctgcgacagcgacatcgaagactttgagcgcgaatgttaccgggtcagcgtggccgacaatctgggcttcgagcccagcgtggtcgcgccgcagcacgtcgagtatctcaaattcgtgctgcaagactttgacgtgcagcacctccgccgcctcaacgaatgcatacccatgccggccttcgcgctcaccagcctcgtcgaccccgtcttaaacaacgtagcgcctggcgagcgcgatctcacgcgtcggataatcacgcacgcggtgatcatcaactattactacgtggcgcaaaagaaagcgcgccacatggtggaggccatacggaccaccgtgcggggcgacacggtacgccgggtagccgcgcaggtcaacaaccagagccgttcggggcgtgcggccgcgctagcgcttcactttctcacgtcacgaaaaggagtgacggacggccagtacgccacgtctctgcggcggctggacgaagagctgcggcatcgcggcacgcccgaatcgccgcggctcaccgaggtctaccagacgctacgcgattacaacgtgctcttctataccgcccactacacctcgcgcggcgcgctctatctctatcggcaaaacctgcagcggctcaacgagaaccaccggggcatgctccggctgctttcggtcgaagagatatgtgaagagcacacgctcaacgatctggcgttcctagtaggcgtcgagcttatgatcacgcactttcaacgcaccattcgcgtgctgcgctgctatctccagcaccagctgcagagcatctcggagctgtgttacctcatctatgtacaactgccgtcgttgcgcgaagactacgcgcagcttagtgacgtgatctactgggccgtcagtcaaaactacgactacgcgctctacgcgagcacgccggcgttgtttgactttttacgcgtcgtgcgtcagcaggacgccttcatttgcaccgactacgtgtactgcgccctgcgtctgctggcctgtcccgacagacctattatcggtgacaccggcggcagcagtagctcccaacgcctcgtaggcgagtttatggtgcgcgatccgctgttgcgcgacccgcgcgccacccacctgcgccagaaactcatcacccgcgacatatgcgtggcgcggttgcaagcgcagccctcgagtcgacacattccggtcgaacacacgggtgtctcctccgtcaccctgctcaaaatctttagccaggtcccccccgacgaacgcgaagaagacacgttacgcgagatggctcttaaagcgtttatggaagcgaacggtaatcaccccgaacaaatctgccgatccccaccacccccgctgccaccgcgcgactatcctcaacgcgacgagcgggaccgtcaccgtcgcgaccgccgcgacagcggggaatactgttgctgatggtgggacgaaacagcagggcggaacagtttatgatagaaagtcacaggaaagtatgtgttgtttttttttttaatgtaccaagaataaaaagtgcgtctacgaccaaagcggtgtgtggacgctcgtcctctgtcttctccggttttttttttatgtgtgtgtttttcttttccttcctattttgttacggcaacagcgctgatggcacgttgccggcttcgaacatcgcgtcggtgatttcttgcttgcccggcgtcacacggtgacgcagcagcgcgcggctcacgtagcaggccgactcacggatgacctggccgtcggcgtcgcgtcgcaggcccgagcggttgccgtgacgcagtctgccctgcgcagcgcgctccacgtcttcaaagtagctgtgtagcaggccgcgctccagcaactgcggcagcgagtcggcggcgcgcaccacaaagttctcacggctgatctcgtagcacagcacgctgccgtcggccgccacgccggccacgctgcggtcccaactgaaaaggttggcgagtccgatggtgccgatgacgcgcaactgaccctgggtcaccaccagcagcttccagtattctacgtcgcgcggggtgaggatggtctcctccacgtcgcagacaaacaacgtgtagccgcgcggatagggcagatccaggtggcgaccgcgctggcggcgcataaaatcgtctaaattcaaaccgccgtcgggtgcgcgcctgctcgtcatcgccgcgcctcgtcggtcgatgaccccacggtgcttataacgcgccgccgcggcttcatgtggcgtgacctccgacctcgtgaggccgaaaacggcgtacatgaagacgctcaaacttttgaatgtgggcccggtagcgcaccgagggccccggggcggcgacgacggcgggtccgagttccagcggggccttgcggcggcagcggttggcgtggttgctcagctcggcgtccgagagcgccgagctgaactgcggcagccgcgtgcgatcctgcggcgcgtccccgtgtcgcagcgagtgccagagtaggcgctggacgcgcaccgcctcgggcgtcggcggcgcgcgacagccccggcgcagcttgaaaacgtgcaggcacagcagctcgcgcttgatgcgcagcgacacgctgcggtagtcgggaatccgctgcaccagctcgagaaagtcgcagaaggtctccacgaacgtgtcctcggtgaagcgaatgcgcttcagatcgtggacgtgtttgcgaaaccgcgacagttctcgacgttgcacggggttctgagcgagtcccttgcgcagcagcgcagcctcgcctttaaacagcctgatgagccgctgcacgtccccgctcaacatacgtatacacgccgtgtactcgtgacgtatactggcgcgcagcagccgaatgatacgcagggccagcacggcgttggaggccaggtacatggcgtagccgcgacgcgggttggcacaggcccagcccgcggggagcagaaagtagtcgtcgaccagcgtctgcgaccagtcggcgaagcccaggtcacgtgatacgctgtcctggacgcgggccacgtcgccggctgtgaggtggcggatcgccggcaggtgaaacgcgcccaggtgtcgattgcgctccagcctcagctcggcgtgctccaaacgggaatggtgggacgccaccgcggagggcgacaaagaggagtggtcgccgccgccgtagttaccgttgtgattaccgccgtcgtcgcgcccgtcgccgcactcgcaaaaggccgcgtagaggtccttcaacgccgcttcggctcgcgccataaacgtggcgtggaaaaaaacggcggcgcggtgcgtccggtacttgacgggcaacccgcggcacagggccgccggcaggcagcggccgatgagttcgcgctcctcgggctccagaaacaggcacagggtgccgtccaggcgcaggtacagctcctcggtcatcgagcatagctgccgcaagtaatgggtgcgcgtcccaaaggtcttgtaatcgagcaacgtgcacaccacgtattgccccgtggccacggccagagcgatgcgtttggcggcgcgactgatctctggcaagtactgcgcctcgtgcaccagacggcggaaagcgccggcgttgagccagcgaaaatgctgcggatcgggcggcaagggcacgcctcgaagcgcggcccagacagcgaggtccgactcgagcgtcagaccgcggatgtcgtacttgccgtgcgccgtagcgcaggctgaatggaccagacagctgcggcgaatgtacaccatggcgtgcttgggatgtttgggcgccggcgttttccttttctgaccgccggcggccgccagatcctcgggcgtgcgacacaacaggccggcgcgcacagcctcctgtcgattacgaatcggcgtcaggtaggcgcgcaggaactggtgacaaaactcctcatcatcacgacagtcgtcgagatactcgtacgtggtgagcggatcgcgaaataggcgctcgtcaccgtcgtcatggtcttctttagcctgctcctccggctgctgggttagcggtggaggtggcggctgatccacggggttcatgactgagaggaagaagaaggtggcggcgaagcgacgcggagcgacggcggtaaagccagacagcggctatatagctagtcatcacagtctcctccttcacgacgcccccgtgccgctcacgctatccagcacgctacgacccgaaaacacgtactcgctgacgtcgtacgcgggcgatgtatggctgctcaccggtttcgcggcaacggttgcgctcgagtccaacggcgagaagcaaaaacgccgtgggcaacgaaaccagaaggagccctgacggataaaaccgcgcagcgtctcggccaacttaaccagcatcgtaccgtacagcagtacgtgaatgccgccatgcgcgtccataaatacggctttgttcacgggttccatccatccgatgactacaaaatgggcctgttctagcacgccgatcacgaaattgttggcctcgtcggcctcggccacgttccacgagccgaaagtgaaagtacaagcgggcgagccgcccaggcggatcttgctaccggcgtggagctgacatacgcgcagcagattggcgcggtcgtgcagtatctgggagagttcgtacatgcccgcaaaggtgtgcttaaaccacgcgccctctacgatctcatccacgtagtcgcgctcaaagaagctgtacacggcaaagaggccgttctcaaaaaactcgccgaacgagagccccagcacgtacaccttgtcctcgccgggcaggtacgcaaaggcgtgcccgtgcccggagacccagatctcgggcgccgtgtttgcgtccggcacgcattcgtacacactgacgaggccgataaagtacaagcggccagcctggcgcaggcacgagaagcgccggtaggtcttgtgatcgcgcaccaccccaaagtactgagtgtcgcccagcatgatgccgtgcagcggcggccagcacagcgggagccaacgacccgccgtggcgcgcacgtagcgctgcaggtgaaccccgctcgcacgctcgcgcggcttcgggcgcttgtgggtccaggcatcacgcagaccgcgccagatgctgctgaacttgggctgcccgcgcagatagagcgacgagagcgagtcaaagtagcccacgacgagcctgtcgggagacacaagagcgcgaaaatcaaacctagagcgacgacggtgaaaaaaccgaccagaagcgcgtgtctcaaacacgctactttcggttataaaaacaccgtcgccctatttctgggcgcgtgtacactgatgactcacctacgctttttgaacggcagtctcagctcgggattggcctcgtacagcgagctgcggtccacggggccgatgctctcgtagcgaaagtcgtcgatgagcagcgccagccccacgcgcacgaagcccctgaggtcgcgcgacagccgcaccaacttatcctgccccaccagcgccgcgtacacggtgcccgtgtcgccgcagagaatccgcacgcggtgaaagaaggtcttgtcctcggcgccctcaatttcgcccagcggcatgacgggctcgcgcgtgtacaacgaacgttgaaagcggcgcagcatcgaggccgagagccccagatcgcgcgccgtgcgcagcactagggaatgcttctcgggccagatgagggtcagttgcgcctcgcggtgcgcctctacgtaggcgcaacgagcggcggtgtcctcgcaggccagcaactcgcggaaagccagcagcgaacgtaggtagcggccgcgagcggaggcgcgcgagcggcggcacagctcggcccgatggtcgggatgcaccaagggcacgttaggttgcagacgcgcgcagatggattcgtgcaccgggtcgcagcggatcatgcccttggcaaaaaatccggccagatccgaggccaactcgtacaggcagtcctcttgcgcgtcgtaggcgaacacggcgccgtacgcgtccacgaacacctggtaccggcaggtggcgtgcgagaccgtgccaatgagatgcagagctcggaattcgccgaaaaagtcgttctggcagtgctccagatcgatctcagtcagcgagtgcggcgaatgctcgcccccgaccacgtagatgcactgcgagggccagcccagcgacacgcacgagccctcgaagcgccgcaagtaacgccgcaggccctcatagtcgcgtcgcacgcacaggtcggccaagtcgcgcgtgcaaaagacctcgggtaccaagcagcgtttgcgacgcggccgacgcgcgtgcccaggcagaggaaggcgcgacggcggcgacgacgaggaggaagacgccgtggccgccgagcagcccttgcgacggccggacatgccggcagtccgcgacgatccacaggagacaaaaaagcagaagcagtagtagtctcggcgacccgctccaccccgtcctccacacgctcagccgcgactgagcgccggggcgcgccgctacttgggtttttatagccatctgccccccgtctcgggcacccgggagcgatctacggagacctgacagcagttgggcaacacaagacagggaaatacaaagacacttttaataaaaaacgagactactttgtgtgtgtgctccgtaaactgtttattctccccctccgtctcgctctggatgggctccgggtccgtcaacacgcgacccgcgcggcaaaaggcacgctgttgacggcgcgagagcccgtcgtgatagtccatcatgccccggagatcgtgcacaaagcagctgtcgccgcgtagaaaccgacgcagcgtctccacgtgctgcagctgtcggcgcgtatcaggagccgtcatcgccgatgtcgtcatcgccctgacaggcgcgtagatggctccgcgagatcatgcgcgttttcaaccgccgtgacacatcaggtccatcttgagctggcgccgggcctcgcgcaggtctcgcacgcgttgtgagcgggaggcgagttcggcttcttgctcgaactcctgctgctcactgtccgagagggtgcgataaaaggcggcaaagtcctccaagtcggctacatgcgccctgggtctgacgctccaaagcgtacgcagtctgatgaagcggacccatcgagcgtcacggcacgccgtcttgaacgcagggcccgggaagagattcttctccccggcgcgctcgggccggcgaggccgacgcggtttatatacaccgtctcggacggcgggacgccgagcccgcgccgcggccgctcatccggagacggcggaaaccgcggcgccggaggaaacggggaccggcaacgacggcggtggcggcgaccagattatgggggacaagcccacgcttgtgaccctgttgaccgtcgccgtgtcgtcgccgccaccgtcgtcgccgctgccgctcgtcagcttcacggagctgctgttaccgccgccgtccgtcgccgccgctgcggtggcggcaacagcgacgagcgaggtgggcgagaaaaccgcggagcaagaggtagcggctgcgggtccggagaccaggaatgagagaagagaaaacagggaggacgaaggaggggagacgaggacgacgggcaccaccgcggtcaaaaggtcgcacgacggtatccctcgccaactggcagagcgcctgcggctgtgccgccacatggaccccgagcaggactatcgtctgccggcgcaggacgtggtgacctcgtggatcgaagcgctacgcgacgcggaccgcgacaactacggccgctgcgtgcgccacgccaagattcaccgttcggcctcgcacctgacggcctacgagtcgtacttggtgtccatcaccgagcagtacaacacggcctcgaacgtgacggagaaagcttcgtacgtgcagggctgcatctttctctcgtttcccgtcatttacaacaacacgcagggctgcggctacaagtacgactggtccaacgtggtgacgcccaaggcggcgtacgccgagctcttctttctgctctgctccaccagcgagagctccgtggtgctgcaaccgctcatcaccaagggcgggctctgctcgtccatggcggtttacgacgaggaaaccatgcggcagtcgcaggcggtgcagatcggttttctgcacacacaactggtcatggtgcccttcgtgccgcacgcctgcccgcattacgccgtgcctttcacgacgccgggaaagccgggctgcggcggtgctccgagcggcgttgcggggttggaggagacggcgccctttggacgggtcagcgtcacgcggcatggcgcgacgctgctgtgtcgcgtggaccatctgacctggatcagtaaacgcgtaaccacgtacggacacaaaaaaattacgcgctacctcgcgcagttccgcggcacgatggacgacgacgaggcggcgctacccggcgaggacgaggcgtggatcgcgtccaaaaacgtacagtacgaattcatgggtctcattttcaccgtcaacgtggattcactatgcgtggacgcggaacagcgccaactgctgggcaccgtggccacctccttctgtcaccgcgtctcggacaagatcacggcgcgcaacatgccgcgcgccttttccttctacctgctgacgagcgcgcagcgcgggtacgacctgcgatttagccgcaacccgtcactcttttttagcggcgacgcgctcaactgtccgcttctcaacgagcccaacgtgttttcgctcacggtgcacgcgccttacgatatccacttcggagtgcaaccgcggcagacggtggagttggacttgcgctacgtgcagatcacagaccggtgtttcttggtggccaacttgccacacgaggacgccttttacacggggctcagcgtgtggcgcggcggcgagccgctcaaagtcacgctgtggacgcgcacgcgttccatcgtgatcccgcagggcacccccatcgccacgttgtatcaaatcaccgagggcgacggtaacgtgtactcgtacaatcaccacacggtgtttcggcagatgcacgccgccggagcaaccacgttctttctgggcgacatgcaattgcccgcggacaactttctcacgtctccccatccctgaccctccgtccgtcctcctttcccgacacgtcactatccgatgatttcattaaaaagtacgtctgcgtgtgtgtttcttaactattcctccgtgttcttaatcttctcgatcttttggaggatgttctgcacggcgtccgacggcgttttggcgccccccatgccggcagaacccggttgcggccccgtaccgctcttctggggcgacgataagtcgaaagccaccgttttcatgcccgtcgtgctcttgacgggggaacctacggcggcgatccccgtcgagcggcgtgattgcaaagccgcgctcgcccccggtttcaggatggagggggaggccacaggcggcgcattcgatacgctgcttttggccgtagacgacggtgggtaaacggtggttaccgcgggatacgtcggcgtggtcgaggcggcccggctgctgccggacaggcgacccggcgcgctaccgctcacggggaccgagggcggtcgacctaccaccgccttgccgcccaaagtaggtttcaaggaaggaacaccgacgcggctgccccggcctttcaccggagacgggggggcactcttggccggggacggagaggctgacgaaagcatggacagcggcgatgtggcaggggacacgacatcatcctccgtgggcgacaaaacggacgccgaggctgacggctgtcgagccgaagaagcggaagaggttcccgcgccagaagtcacgttccttgatgacgtcgttttagacgaagccggttgaggttgcaacagcgtggcgggtaccgtcgacggcgtgcccgacacctgtttctctagccttccctgaaccggcgtcgacgtcaccgtctgcgctcgggcggacgcgtgcggcgtcgcgactcgcttgcccagcaccggtttctggctcgtggatgtcgtcgtcattggagacgataacttagctttacgtattctggacggcgtcgactgctcgggcgtctgactgggaggcgaaatgacgtcgttgttgtaatcggacgacggtgttgtgtgtcccaggctgacgacggagccggtgtccgaggagtcgtcgtcttcctcctcgctgtcttcgaccggtgactctgcagtttggtcccttaaagcccaaacctcatcagcggcgtcccgagacgctgtttgtgtcaccgcggcgcgtggagtcgacggcctccgaggggtggtggacacggtgttttgagaagccgtggaagtcgtaggcatcctgaagggattgtaagccaggtgaggattcttgagggcccacgcgcgttcgcgcggccagttggcggggttcatatccccgggcaacggcgccgtcggagcccagggcgagttaccgttgaccggggtttgggtacccgcgaaggtaggtgtcggggccggagcgggggccgtggaaggattgacaggcgtcggcgtgaggatggcagcgccggcgccagcaggaacgttaactccggcgccgaacgtcaacgtcggttgctcgaacttgtacgcggtggtgacgggcggtttggcgctcgtctcggtatccgtgatgtccaccagcgtgtcggtgaaacgcggatcttgacggttggggggatagccatccgagctgtcggaatcctcgtcgcccgagaaaagatcccctctggtctccgtgagcggcctcacgtcccacgcgctgtcccgacggacccttcccgggctggccttggtcacctgcggggaaacgagactgaaagccgcgtgacgctgttgttgctgcgggatgttcaagggaccgctggtcggtttctgactgcccgaggataacaggccgctgaaaatgctggaaacaccgccaccactagcggcgcccttgccgctagttcccggtttcttgatgggcgtaaagatgtttttctcgtcatcatcatcgtcgtcgtcgtcctcatcggcactggagccaaagagcctccgggaggcgcccggtttacgtgtcgggggcggcggttgctgctgacgttgctgcaggttctgctgcctctcctcccaagccttcagctgctgtttctcacgctgcaccacctcgtcgtccacccgtttctgccgctcgcgacgcttttcctcttcgtcgtaatagccgacggccgccgaacgggcagcgtgggcttcggcggccggtgccagagaaccatgggcctcgaagcggaacggtttgtgtcccttccagggactggcgatccagctccagccgtccagcggctgcgtggggacatgtttcttgggtaccgacgagaaggctgaaccgccgccgagcgagaggagattggcgtcatcatcaaactccaacgacggcgagcgcgcgcccaaaaaggtgtgcgccgactgcgggaagctgtccacgtagatgtcaaagtcctcgatgagcagctccagcagcgtgtcggccgagtcgccgttttccacggcgtgcttgaggatattgcgacagtagttggaatcaaaggaaaggcacatgcgcagctccttgaccagcagcttgcaacgctcctgaatgcgcgccagacatttgcgctccagctcctcccaagacctgcgcacgttcatgatgagacggcccgtgtacacgagcttgttgacggcgttgaccagcgccgtgttggcgtgccggtccaggttaaggtcgagcggtttcgcacagaacatgttacggcgcacaccctccaggttttcttcaatgcgctgcacctccgtatccttgaggtgcacaaaggcgatgggttccgtctggccgatggctgtgaccagcgtctcgcgcaccgacatcttggccagaatgaccgcgcttacgagcgcgcgctccacgatctcggcatcgtggcgcacgtccgtatcgaattcggtacggtctagcacagccaggtggtcacgcgccttaccacgatcaccgaacgggtaagtgtagccgcgacgcgccacggccgcgcaacgcacctcgaactcctcgagcaccgaggaaaggtcggggttgtggaaacgcagctcgcggtagtatcccaaccaaagcatgagctcgttgaacagcaccgtacgccggtgcaggcgtttttcgccgcattttttcaggatcttggggtgtgcctcgagatccacgtcgggcttttgcgtgagatggcgcagaaagttgaccagggctaccacatcgcgccgctgtagaccgataaactgcaaactcatgctggcttttctccagaacccggaagcgtcgtcgccccggactgcgcccgcggtctgctattcgtccacgatggacaccatcatccacaacaccacggtgagcgccccacctagagggagggggggtagtttaatagcggaggcggatacgcggttttcacccgggcgccgctgacttgtttcttctgttttttactccgtatgctgttccgcccagaaccgcagtaccgatactccgcatgtcaacatcacctgtaacataacggagccgctatccgccatccgtaccacagaagccgtgatcaacacgttcatcattttcgtaggcggcccgctcaatgccatagtgttgatcacgcagctgctcacgaatcgcgtattgggctattcaacccccaccatctacatgaccaacctctattccaccaacttcctcacgctcaccgtactgccatttatcgtgctgagcaaccagtggctactacccgctagcgtggcttcgtgcaaattcttgtcggtgatttactactcgagctgcacagtaggctttgccaccgtagccctgatcgccgccgaccgataccgcgttcttcataagcgtacctacgcgcggcagtcgtaccgctccacctatataattttgctattgacctggtttgccgggctgatcttttccatgcccgcggctgtctacactacagtagtgatacataatggtacaaatggacaaagtagcaatggacacgctacctgcgtattgtacttcatagccgacgaggtgtacacggtactactctcgtggaaagtgctgctgacgctagtgtggggcgccgcgcccgttatcatgatgacgtggttttacgccttcttctactcaaccgtacagcgtgcgtctcaaaaacaaaggagtcgcactttaaccttcgtcagcgtgttactcatctccttcgtggcgctacagacgccttacgtgtccatcatgattttcaacagttacgccacggccgcatggcccatggactgcgaacacctgacactgcgacgcaccattggcacgctgtcacgcctggtaccccacctacactgcctcatcaatcccattctgtacgcgctgctgggtcatgactttctgcagcgcatgcggcagtgtttccgcggccagttgctggaccgccgcgctttcctgagatcgcagcagaatcagcgagctacagcggagacaaatctagcggctggcaacaattcacaatcagttgctacgtcattagacaccagtagcaaaaactgcaatcagcacgccaaacgcagcgtgtctttcaattttcccagcggtacgtggaaaggcggccagaaaaccgcgtccaacgacacatccacaaaaatcccccatcgactctcacaatcgcatcataacctcagcggggtatgagctttcctgttactttattcagaaagcaccagaacccgtcgccatttcccctcatatacggtacacgtccccctgatctgtcatcacggtacacagatttcgcccgactgcggacgccgacggccaatcgcgtggcgtaggagtggcgccccggcttcattataacgccacgtcggagcccctgcgcgccacaacgccgtccggcgcaacttctgtctcggcacggtacgataaaaacgacgtcccccgtcgacgttgttttctccgagcggtgatcgttcccgtccctctcctccctccgcggcccccacggcggcggcctgctcgcacggacctatactattaccgccccaccgccgtcgtcgtcatgaacttcatcatcaccacccgagacttctccaacgacgattcagtcctgcgagccgccgagatgcgtgacaacgtggcaggctcgatttccaaagcgtacaagggcacggtacgcgccgaaggcaagaagaagctgctgctgaagcacttgcccgtgccgcccggcggctgctcgcgccgcaacagcaacctcttcgttttctgcaccgagcgcgactaccgcaagttccaccagggcatcgcacagctcaagcgcgcgccggccgaactggacccccacgagatccagcaagtcacggccagtatccgctgccgcctgcagcccagtctccgcgagccgcccacgccggccgacgagctgcagacggctgtgtcgcgcgtgtgcgcgctcttcaaccagctggttttcacggcccagctgcgccactactgcgagcaccaggacaaggtggtgagctacgcgcgcgacgagttgaccaaacgctgcggcgaaaaatcggcgctgggcgtagaggtgcatcaactggtagccttgctgccacacgagcgccaccgcgaactgtgccacgtcctcatcggcttgttgcaccagacgccgcacatgtgggcgcgctccatccgtctcatcggacacctgcgccactacctgcagaacagcttcctacacctgttgatgaactcaggtttggatatcgcacaagtcttcgacggctgttaccacagcgaggcctaccgcatgctcttccagatcggtcatacggactcggtgtcggcggccctggaactctcacacagcgcggcggccgggccgcccgaggccgatgagaacaacgacgagggagaggaggacgacgacgagctccgtcacagcgacccggcgccgcttcacgattccaagaagccccgcaacgcccgtcgtccccgcacacgcgtgccgcctcacgagcaaaagcccgaagaaaacgaggaggaagaagaggagctgtttccctcctgcaaggcaaccgcagcattcctgcgggcagaaccctccgtctccaacgacgacggcaacggtggcgaacgctgcgacacgctagcgaccgccctgcggcatcgcgccgacgaagaagacggacctctagccagccagacctctgtgcgagtcgccgcgaccccctcaccttcagtcacctcagcccttacccccgtcacgtcccccataaccccgttgtgtatttaacgtcactggagaacaataaagcgttgatttctcaagttccgctctggttttggtttcgttttcaaagggggccccatcatggcccagggatcgcgagccccatcgggcccgccactgcccgttctccccgtggacgactggctcaactttcgggttgacctgtttggagacgagcaccggcgcctgctgctcgagatgttgacccagggctgctccaactttgtggggctgctcaactttggcgtgcccagccccgtatacgcactcgaggccttggtggacttccaggtgcgcaacgcttttatgaaggtgaagcccgtggcccaggagattatccgtatctgcattctcgctaaccactaccgcaacagccgcgacgtattgcgggacctgcgcacgcagctcgacgtgctgtactcggagccgcttaagacgcggctgcttagagggctcatccgactctgccgcgctgcgcaaaccggcgttaagcccgaggacatcagcgtgcacctgggcgccgacgatgtaacattcggcgtgctaaaacgagcgctggtccggctgcaccgggtacgcgacgcgctggggctgcgcgcgtctcccgaggccgaggcgcgctatccgcgcctcaccacctacaacctgctgttccacccaccgcccttcaccacggtcgaggcggtggatctgtgcgccgagaacctgtccgacgtaacacaacgtcgcaaccgaccgttgcgctgcctcacctccatcaaacgcccgggctcacgcaccctggaggacgcgctaaacgacatgtatctgttgttgacactgcgacacttgcagctgcgacacgcgctggagctacaaatgatgcaggactgggtggtggaacgctgcaaccgtctttgcgacgcgctttacttttgttacacgcaagcccccgaaacgcggcagactttcgtcacgctggtgcgtgggctggaacttgcgcggcaacacagcagtccggccttccagccgatgctgtacaatctgttgcaactactgacgcagctgcacgaggccaacgtgtatctctgcccgggatatttacatttcagcgcgtacaagctgctgaaaaagatccaatcggtctcggacgcccgcgagcgcggcgagttcggggacgaggacgaagagcaggagaacgacggcgagccgcgcgaggcccagctcgatctcgaagccgatcccacggcgcgcgaaggcgagctctttttcttctccaagaacctgtacggcaacggcgaggttttccgcgtgcccgagcaacccagccgctacctgcgtcgacgtatgttcgtggaacggcccgaaaccctgcagatcttctataacttccacgaaggcaagatcaccaccgagacgtatcacctccagcgcatctatagcatgatgatcgagggcgcctctcggcagacgggcctgacacccaagcgcttcatggaactcctcgacagagcgcctctgggccaggagtcggaacccgagatcacagaacatcgcgatttatttgccgatgtttttcgccgtcctgtgaccgacgcggcttcttcgtcgtccgcgtcttcgtcgtcgtcctcagcatctccgaattctgtttcgctgccgtctgccaggtcgtcatccacacgaaccaccacgcccgcgtccacgtacacctcggccgggacttcttctaccacgggtctcttactctcctcttcttctttgtcggggtcgcacggcattagctccgcggacctggagcagccgccccggcaacgacgccgcatggtcagcgtgaccctcttttcgccctactcggtagcctacagccaccaccgacgtcaccgaaggcgacgcagcccgccacccgcaccccgagggccggcccacacacgcttccagggacccgacagcatgccgagcactagctacggcagcgacgtcgaagacccgcgggacgatctggccgaaaacctacggcatctctgaacgcggtttttcctctttttctacgtgtctgtctcaggacgagacgtcgatatcaataaaaataccgtcgacgtggttttctaacagcgtggttttctttattgaccagcggagtacacagtttacgagtaaaaaagacagggaaaggttatataaaatgctgtgttatatacaaaaacatgcacatagacagacagaaccaccgtgctcgtcgtcccctccttaatcagttgttcatgtaggcgtgtggcggggtgaggggcggcatgccgttggcggcgccgggaataatgtgccgtcgaccgacgtcgcacaccttgaaacgccgtcggcgcacgcagcggtcgcaggacgggatatcccagaggaagcccatgtaggtctcggggtcctcgtcgtgaaagcggtaagagagttcaaagtggtgcaacgagcccgtccgagctcgcagcttctggcgaacaccctccacgtcatcggtgcacagcgacagtgctgggctgtcacacagggcctgaagctcctgcggccacaggtgcgtagccaggggcgagtccgtcgtcaccagtttgacgcagtgcatcaggttctcggtgatggcgtcgtacaggcgactctcggcctcctcgtgcgtcatcacgtttcgaggcagcgacagctcgtcgtcgtcatcctcgtcaaacatgatcatggggtcaggggtttttttgggatgttgacaggtgggtgtcttttccagacgcacgatggcctcacgccggccgctgaaacggtggtttcggtgtcccttctttcccatgacgcaggtgaacataaccacgtcctcggccagacggtagacggcgtccatggcggggtcgtagccgtagacgacgccgaaagtgtccaccaagacgtactggcgtacgaggaactctttgcgttctggcacctcgtggcccagcgcgcccaacaactggtggtaacaggtgatgcgcggcacggtacggatcatgagctccatggtctggatgctgccgcccgcgcggacgacgctgaaagatgtttccttgaacttcataacctctgtgttgtgggtccagaaggcgaaatgggtgtcgggacactcatcgaaagggtcgtcgatgctgtaggaagcgtagccccgcttggtcacctcggccgacaggctctccacgtcgccgcggtagagcataacggcgttccagtagtcgtcatactgcaccatgggccgctggtagtcgcgcatagtgtggaagtggtcgcagtgacgaaagccatgccgcagaaaatccttcatggtgggcgccagctcgtagatgcagtcgcgcaggtcatcgtagcagtagatgccgccgcgctgcccgatgagcacgatgagttggtagcgcataaagcccggaccctcgacgaagccaaaggggtgcaggtactcctgacagcagacgtaagcacctggtagagaatagaaaaaatccacgcacgttgaaaacacctggaaagaacgtgcccgagcgaacgtcctctttccaggtgtcttcaacgacgtggggcttaccttgcgaacagacggtgcccatcttgcccacgaagggccccagggcgctgcgcgaacggagctggatgaagcagcgttcgggccaggccacgtgcagccgggtgccgcattcctgctccagaaagtcgttgagaccgttgaagtccccggctcggatggcgatgcagccgtaggccatcagcgtgtcccgtaggtcgtccatgacggactcctctaccttcgctcgccgacgctgcgcttctccagccaccgctgcggtcgacagactcctccgtccgccttcggagaactacggcgcggcggcacggcctttatagacactatcagcgttgacgtcagacgatccaatgaacgtcgttttttgtgctggaacttccctcgtcccgacaaatgtagcggaaatcttcaagcaaatcgcgacgaagtccgatgaggaggatgcagaagaggctgagcaacgcgatgctgcccgccgccacagtacatatgctcaacaacgcccagtgtcccaacgcgcgacttttggctcggagcagagccgaacggcggtttttccacatgatggataacgtagtccaatatttccacccctggcattgttgtagtgtccactcgggaagcgacgtcacgttagttcccgtaaaagttgtgtttcttctgttgtttttcgcaagcttaacgctcctcttaagaaaccgcggacacatgtcttgtagaaaaatgtaatcactttccgcatataccgttaagactgacatcacggtgacggtgttgttttccgaagacgtcgcgttgtcggtgacgttggtttcctcccaatttacggatgactcaaacggactcgtgcgcgccagtgcccgtaatacgtaactgcggccggtaaggttaagcgtcagctgtcccatggtaatgttagtgtcatttgtaaaacacgcaacctccccgtagacctcggtgacgttgatatcgcggctctcgttcaggatgcgcaggggaaaccagccttccaggtggtactgaaaaccaaacgtgagcatgacgctgtgccactgccgacgtgattgccgaaacgttacgttcaagggcagtttggattcggctccggcgcaggggccgttgtagatttgcgtatgattgcacgtgcagtttaaccggcagttcatactcgtggcgttggaagtgacgttaatgtccgtaccgtggtacgtacatcgaacagaaacaccgtatcccgtgctccaaaacagcgtcaacaacagccacacagacacctacgtggggacgacacgggactttttattgacggagactcacgtttctgccctcccctttcccgtaggtaaaaacccacgtttatcacacacgttgtttttacctgaaacccgcgcagcccgtggacgcgacaaaaaaccgcggcactagaaagaaaatgaaacaagtatgtttattaagcagcatgtggggctaataggggggataactgaggtatagcaactatgaaaaaatactacaaaaaaaaagctgaacatggtcatctagcagcaaagttctccttctagaccacgaccaccatctgtaccacgtcgccctccccggccgtgtacatcacatccttcaccacgaccggcggcaacggcggcgacgaggacaactcgctctcgacggaggccgggacgacagaggacgggggggtggtggcggcggaggacggaggggtggcggcggcagcggggtcttcttccgacacgggcgacggcaggctcggcggcgcggacagcacccgttgcgccggagcgtgagaaggctgagccccggtggcctggatgtgggccaacgaattggctcgcagcgagtcgcgatccacgaaggtcataggaattttcccttcgcggattcgccgctcagattccaggatggcgcgcacgtagctgttcaccgacttggcaaaagtgcgcggcccctccgtattcttgtcgcgacgcgcttccagcacctgcttttcgtagtccagctggtggaagaccatcaccaggtcgtccatagtgtgcgcgtgctgacggacgtgggagcgcacctccaccgggaacaaagcgttccaatactccagcactatggcaccgtgccagaactgcgccatgctgggcgccaggaaaaacaggataccggagtcgtaggcgaacacgtcccacttgggcgtcatgaacaacaccagctgacgcgtgggccgcaccgaagcttcctcccaggcctcgatgaccccgaacatgatgagctcctggtccaacggggggcagtgtcgctccagccaactgatcttgctcaggttcatctgcagaaactcgtaagaggggtcgcagatgcacacgtagagacccgagtcgtgccgcagcctggctccgcgcttcatcagtttcctcaccgcgtagcgaagcgccaccttgcccaacgccgacgcctggatcagtccccccacgtccatctgcgtctgtcgccactcggcctcgtccagcaggctcatgatagcggcggtgctatgcgtggtcgtagtcatcctttctatccttctctatgaatagcagcaatagcggtaaagtcccttcttatactatcccggagtctgtggtttttttgtttacccctgcttactggtgagactgctgggggccgttgtgctgcagcagccgagctcgtcgccgccgttgccacaggaaccggtgcctccgcagggcctttttgagagcctcgcaggcttctcgcgcaagtcctgagaggccctcggcgtccatggggttcacctcgggcgtccgagcctcgttttcttcttcttcatcctccctttcctcctccgtgtcctcccgctctgtgtcctccgttacgctctcctccccggcctcggccaagagcgcggccaccaagtccacggaccgctcggtctccgagttctcaccgtcaattacgccatgttggcggcgtaaccggtgccgagaacgccgggtgagcgcacatgcttttttctttcttaaccaaggcgggagaggatcttcaaggcgttttcgctggatccagcggtagctaaagtaccaaaaggccagcaggcccacgctacctaacagattcacgtagactggagacataattaaagaaagaagtgaaacccgcgtgtgggtctcacgtcgtcttgaaacaccgtcttatatacatgaagatgccggacatgacgcgcccaagacacgtggggttttccccttaggcgacccggtttcttaagatgtttttcatcttcgcacgcgatgtactacatcaaagggtcggctgaccgaccgcattgacgcacagtttccgagtacgcgcgtctcggagcacctgacggtgaaccacccaactcacgcggataggggacaacactgacgtgaggggcgattcacgtcactgacggctgacgggaataagacgggtgagggatttccacatttttcttaagtgtgactctccttacggtaaatcgcacctgtgacttcttaacccctcctccctggtacccgataacagtgaaaaacacacaccacacgtcacgacaccgatcgattttctttattcttagtgtgatgataggtaagggcactcgtgaggatgtgcagttatcattatcaagccttcttcaaggcgtagtgatgatcgttgggcagaacccccaggctcctagcgatctgggaatagaaggaggagaacgaccccaaggccagaatgcccacagtgtacatggcccaggtctccagaccgaacgtggcgggtcgcagcttcagatggtaggccacccgctccgagagttgtgaatgctcgttcaggcaacaggactgcaggtgggtgagcccaaaagcgctttcgtttacgccgcgcacgtgcaccgtctgggccgggcaatcctggtgttgcgcgcgaaaatggtcctgacaggagattccgtctacgtggcgacgcgtgttgttacccacttcgatcagcaacgtgttatcggcaggatgatgcgagaacgcgacgacggtgttgctggaggtctggcggcagcagtacacgtcgagcgtcatgaggaccatgtcgccttggtggtacacggcgtacgcccaaccctggaacacgagcggacatagcggaccgtgagcggacgtcacgccggcggttgttaccgtcgtctcgacaggagaagacaataaactcctgatcctcatacacaggagtccaaccgtcagaattaaagtccgcggagccataaccgcgcaagtgaagccgatacgagtgttgctgaatttgttcattctgccgactgttgctcacgagcgttcggaggcggtgccacaggctgttggccattaaaaagtcctggcccgaatgacgacgagacagagcccgaggcgaagaaaaaggcgcccgtcatgaagacgtaggcaggggaattcccatatttttatggcttcttttaaaagtctgtatccgactccatccggcgcttttcccaaaccgtggtctcctcgtcgtccgactcggtacccaggaggtggtaagtcttttgccgcacgtagaaagctttcaacgtggagcaaaagatgagaataaagaccccgaaaacgaaacaaaccacgccgatcatgccgatgcagacgttcatgtcgacgtagccggcggtgctgttggcggtgcggcaaaagagtgtcatgtcgtgcgtgcacaaaaaacaacacacaccacaggccaggtcgtagcgtagttattattccgtagcagcaatgatggtacagtcaagcacatgctctatccccgttaccccgatgatgcttgcgtccccgttgttatattggcactgtcccggttaatcaccacggtgaacaccacggccaagaaaatgatccctaatatagcgaccactaagagagcaaaagtccatttccagccgttgtcaaagtacgcccccgtggtgggatgcatggtggcgggcatttccatcatatccatgtcgaacgtgtgtcgcggcgacggcgaactaaccaggcagtacgggggtcgatagggcggtgggctgcagtcgggtggtggcggcggtggcgtggaaaccgtcgtcgggcacagacccatggcctgctcgtaggtggggggcgcgtcgtcgtgatcccggtcgcggagcatcggcgtgggctccatgtcggtggcagtgacggcgacggtggtaactgtggtggagacggtaccgacggcgtccgcggctcaccttcgagcaaagagccccttctttttgcgcaaacgacgacaaaacagttctctgggacagccggtggcgcggtaagcgggtgccacgctttcagggtgggtaaaacagtcgcgggcgaagcagtagttgttgcagaaccgcaagaacccgacgcgaaagaagcccaggagtccgcgcgccagaaagtgcgcctgccgcgtatcgggatgcacgccgaagacggcgccgctctcgttcaccagtatggagatgtccaggcgctgctgcgactccaccggcacggcccgcaccacaaatacctgcagcacgttcagcgagcacgtctcttttaaccagttgccgtgggccggatcctcgtaagtctggctcccgttcaagacgaccgtcgtcagcgcctcgttaccgtctcgccagctgaagatagaaccctcgcgcttcatgcacaggcgccacagggccagcaggtcgcgcgccaacatgaactcgcgacccacgtcgccgccggtctcgaagcggacatagcccagttcttcgcgcagcggcgcgtagttgcgcaggccctcctgcacgaagccgcggaaaccggaccgcgacaccaggtacagcgattccaccacaggcgagtagacgtagacgcgaccgccctcgccgatgagtacgggtagcggtgggcggccgatggcttcgcaacgactcacagtgcccaccggcagcaagaacttgtcgcagcacaggaaggtcttctccaaacctttaatattgagatgtccaaagtagccgacgcgtaacaggtcgcagtaggtgaagaaccaaccgtttggccagctgagacgcagcaccgtgccgctgacgcgacgaaccagcttctgcaagtccttgcgggcgtcggaggtgacagagcagcggaaggtctcgttgaccagctcgacagccagcgcgtcctccagcgtgcgttccttcatctcgtcgttgatgctctggcggcgccgccggatttcgtcgaaacgggccgcggaggcggcgaccgacgcggaggtcgtccgaacgccctctgtgacgctgtcgtccggccagtcaagaaagctaaggctggcgctgcgccgcctaaagtgtccgatccgcgcgggacgtcgctgagggacggtggctggtctgctggggcgggtacggccgcgggtgtccgcggacacgttagttatacacggaattgagtcacgtggcacgttgccagctgaaaccgccgtcgtctccgccggcgttttctccatcgcgggaccgcgccgtgcgcacgttcccaggcacgcggcccacgctctagccgcacttttgcttcttggtgttagggacgaactcgaacgttacagaatcctcgctgtcgctctcctctttcgcgtcgttgaagtaattgccggagttgcgatccaaaccgccgcctcctcctccgccgccgccgcccgatccacctttggacgtcaggtagctggtgatcttgtgctgctcgtatttttccttggaggaaagaccgtggtcgtgatcaccgccgccgccaccgctgctcattttccgcgtaccggaaccaccgccgccaccgcggtcgtgcttcttgccgccaccgccgccacctcctcccagaccgccgagacccatgggctcgttcataatatcgttatccagacccgggccgtcgtcgtgcagaccgccggcattagccagcgaagagaggctgccgctaccaccgccgccgccacgcgatttgccgctgttcccgacgtaatttttgtcgaagggatcgccacgctggaaaggttcctcggtgagaaaattctccacggcgaacagaccgttgcggctggccacgtacaacagcgtgtcgtgctccgtaactatacgcaacgtgcacggcagtttggtgacggcgcaattgagcagcgtctggtagaagttcttcagctgcacgttgatacgcatgtttttcacgccgtggaaactgacgcggttattggctgtgaattccagctcgctgccgttggtcaggataaacttgatggccggtggaccggcgtgcaccagaatctgcacggtgcccgtagggcagggcgcttttttaacgttacgcttgacgcgggtatgcggcccgatccacttaagcaggtcggccaccacgccgaaatctagatccacgtgcacggccgaattctcgctttcgcgcacaatgtcttggccgtgcacgcaggccgagctgaactccatattgaaatcgggcgcgcacatggagatcttggccgacaggtccgagatgtcctgcacgtagaacttggtcaggtccttgctggaagtcaggtacatgaaattacccagcagcggcgtggaattgttaatggtcttgggctgaaacgacttgtcagtgatgtagaggcatgagctgttaaaagtgatttttgacacgcagtgactgcgtaccgtttgcaagataagcgacggcgtgggcaagaaggtaaccgtggtgttctccttgagcgcacggatcacagatcgcagctgctggatagccgtcttgtacggcttcagccgcagcgccagcgtcggcggctccgagaggcgcgtcttgcgatccatcccggacagcgtgcaagtctcgactaaggagcgggcgcgagcgagcgaaagttttatagagagcacacacgacgaccgggaacgctgcgaagacgcccggcgtctaataatacagccgcgccgagccagcgggcccccgactaagaggcacagtacttatatactccgaccttaaagcgccagtggtaccacttgagcatcctggccagaagcacgtcgggcgtcatccccgagtcatagtagaaaaccagggccacgcactggtccacaaacacgctcaggttcacggccgccatttccacgtcgttttggatcgccggtgccgcctggaacagacactgcgtcgccttgccctcctcctggtgctgctccaaccacgcgtaattcaccacgggcacgcgcagcggcctccgcaccacggtggggaagtaacactcacggttgggcgggcacaatgaccacaccgtctcctcctcgaacacggtgccgcgcgaagcccacactgacggcgtcacgccccacagatgcgccacctcgtcgtcgggacccaccgccagaaactgacagttgcgcaatccgaactcgagcatgtcggcgcgcagcgcttcccagcgcgcgctggcgatggagagccgcggcaaccgatacaattcgaaaatgaatttgccctcttgatagatggtgcgttcgaaccactcgcagcgcggcaaacccgacttgcacaaatcgacgctagcgcgcaccgcggcaaagtacatgtgctcaaagatgcgctcgatcaagtcccaagaggcaaagtacgtgaaccctaaccgcatgagcgccgtgtgcaagccagccacgccgatgtgcagcggacgcagtttttccagcgcgctctctacccaccattcggacgccgacattagcgcgtccaagcgcgcgttgccccaaaccaccgcctcggtcaccaactcgcgcagcacgctcaaatcaaagtaacgtcgcgtgttccccaaaaccacgtcgggtagatgcagcttctgctcgtcgctacgcgcaaacacgcagcgagccacgttcaccgtcagccgctgcaccggcatgtcacactcgccaaagtggcacgacgccatatcgggactcaagcacggcggcaggcacacgctgtcggccataatcgagtacttgactacgtgatggacaaagaccaccgaggcacggcccttgagcgcgcacagcaacatctttttcagaaaatcgtccgtgttcacgaccaccttggggcacgattgctcgcagcgcgaatactctttctcgaaagccgactcctgacccaggtccgagagccgccgggagacaggccgcccaaacagcgagtagcgctgctcacgcgcacggtagcgcttcattaacacgctaggcacgttgaaagcgtagcaaacccccgtcaactccgacgtgctttctttgagaataaagttaatcacgcggatagcggccacgtcccacatgtccacaaacacacgtaccacgggtcgatgcacctccttctcgcgtatcaaatcgcagtatccccccaggcaacgaatcacgctgttcacatcggcgttaagtcgcgttacgttcaccgacacagaaacgccgcaactcaaggtactcatccacttgcacatggccgcccaactggcgtcacgcgagaaagggtcggccgagatcagaaagtcgtactgcggcacgcgatcgaaacccacggtagacatggtgaaggtggacagcgacagctgcccatcgcgacagcgcttcaacaccgattccaacacctcgccctcgaaacgcgcatccagatggaaacgatagatgcgcgagtgcctactgttctcgatagcggccgtcaacgccacggcgatgcgcaaaaacacgccgcccgggctctcgtcctgtccgtgcagttggcgacacaccttatccaaacacaaaatggccgcgtacaagccccagcaaccggccaattccacaaaacgcgccgtctcctcggccagcttgggtagatcctccatgtgacgcagcacaaaacggcgcaccgactcatcgcacagctccgaagcgtaacacagtggcgtgcggctttcacgcgcccagttggctttgaaataaaagcgacccaacagcaggtcgcaacgcggcgagtgacgaatcagacagggaccgtggcgcataatgagctgaaatagcctgaaactgcccaaaccggcactgtgccgcgacacggtgtccatctcgcgccacagcgcgttcctgtcggacggcagctcccgcgccggctcctgtacgccgcaaaagcgaaacttgccccagtagccgtgacaatgacactttttgcccatcaacatgcgcatagcttgtatcggcggcgatactttgcagagcgaagccccgaaatcgtcctcctcctcgacactgtccagctccatcctggtcgcgccggccggattaaaggtgctcagaccgctactcacgcgtccaccgcgactgggcacggcgggaccgctgtcacgcgtcaacgacagcacagacggcgtgccgtcgggagacggcgactcgggacgccaactgacgacgccgccaccactcgtaaaacccgctacacatgctacaccgctcgatacgttggtatttccagcggacgcttccttgtcacccccgggcagcggcccctcctcgagctcgctgtcatctcccccgatagtatcagcggcgacctctgccgacgattcctccgtctcggtttccgcgctgcggcttggaatcctacctggccggcaccgatgtgcgggcaccgaggacacccgctgttcctcgtccgcgtcagccggattcataagtttacgaggaaaataacaaagaaatcaggtagatttcaataaagtgagtctagatggcgccgacaactacggtttataaagtctgtgtgcgatgtgtttttttcttctgtgtctcctccccgtatgctgtcagcgccgctcagacgaattctcgaaagtctcccaattcgacgctaaagttgtccaaacggacgacggacagtttgagttctttgtgtaccaggaacgaggtgtgaatgtcgtcagccaggcaccagcccagcttttgtatgaccccggtacacagagggatctggcgcgggcgcgtgatgcgacggttgacaaagctacagcgctcgcgggcgaactttccgcgtgcaacgtcgaccaaggtctgccagtgtgcgatgctggaggtgagcacgtagatgccgggacgtgtttcgggcccgtcatagtcatagacgatgattaaatacacgtattgcagccgtccccgggtctcttcccacgtcaggtacatgtctttcggtatcatcaacgcgaacacctccgttttgagcgtgttgtaaaggtagccgcgcatgacgcaggtgagcaacgaggtgatgcccagcgagacggtcttgacgcagcccagcgtctcgaggcggcggtgcagcagatgcgggcccaggtccagccactgcagcgcggcgcgcgcggccgaggccgtgtacacgctttcgagcaggcagcgcgtgctggccgagacgttggaggcgcgaatgcctaacaggtaaaggctaatgtagaggtgtcgcggcgagtcgcaacccgtctccatgcggatgagcagcgcgcccggctgcgcctcgaactctaccaggccctcgggcacgaagaaacgcgccgtgagcgcctggtgatcggcgtggtagagatagcgaaccgatatagtatttacctcgcgtttggctttgagcgccgtcactagttcattgtcctcgtcggccgggtcgcgcggccgtttggccaccgcgcgcgcgtccatgatggcgaggcgcacggtagatttcaaaaagttgatagagcagctgcgggcacgggccacggacaaagcggaggcgttaaataccgtgagccaattggagatcggcgcggtggatgcccaggacgtgaccgcgagcgccgtgcgcgccttcgtgggtgcgttgccgagctcgggctaccactttggcttcgtgcgtcagaacgtggtcttttacctcctaagccacgccacggtacagacggcgcgcgacccgctgtacgccgccgagcagttgcacgaacagctggaccgcttcctgcgacaccagcacgacggcggcggagacgaggaccggttgccgttctaccacaacggggccacgctgacggctttccagaagctgttgcagaccctgcgcgagatccagaccgtaatagccgaacagagcggcggcaccgcggcggcggcggacttgatcgccagtaacaacgcgtcgaccgagcgccgcggcaagaagggcggttcgagttccgggggccagcagccgctggtccgccgggtgatcacgcagctggaaacggctgccacggaggcgcggccctacgtcaattgtcgcgccgtggccgaactcctggacctgacctaccagcggctcatctactgggcctgcacgctcatgccctacgtgttgtttcggcgcgacaccgacaccgaactggacacggtgcttctgatgcattttttttacacacactaccgttcggttaacggcgatttggccgtggagtttcaaaactacgtcaagaacagcgtgcggcacatgagctctttcgtcagttccgatatcgacggcgaccagaagcccggtgccgaacacatgcgtgacgtcagctacaagctgttcgtgggtaatctgcaagcgcgtgacgccagcggcctcatgtttcccatcattagcacgcgcatctccaccgtgaacctttacctgtcgcccgaacgtatgtttttccacccgggtctgatctcgcgtctgttgagtgaggaagtttcgccgcgcgccaacctagacgcttacgcgcgcgtgtgcgatcgcgtgctggaagaccacttgcatacgccgcgacgcgtgcaacggctactagatctgacgcagatggtaatgcgactggtggaactgggtttcaatcacgatacctgcgcggcctacgcacaaatggcgctgatccagccggccagtcagaagagctcgctctttgtcagcgagattcgcgagaaactcatacagatcatctacaatttttacacgtttttcatgtgcctctatgtgtacagccccacgttcctgttcgaccaccggcggcggttgattttggagcagcatcgatccacgttgatcggctccaaggaggaactacagcacgtctggagcaacgtgacactgaacgtcaatacgcactttgcggttcagtacacggaagaagactttgaggcacatacgaagggtgccacggaggcggagcgcgagtacctgtatcgggacctgcacagcaagtggggcgtgcacctgtttaccttgcgtccgtctcgcggcgcggccggcgcggcctcgcctttgcctccgcttgacggcgtcacacgctccgacatcttacgcgaatgcgcgctcgttaatctgaacgaaggccgcgtcaactacgcctccctgctagccttcagccatcatcccgagttccccagcatcttcgcgcagttggtggtggtaactgagttctcggagatctttggtatcccgcagggcctgtttcaagccgtgggttcgccgcgtcttttcgcactcattcagctgtgccgtgtattgttgcccgagcaggtgacgctgtaccagaacctggtctccatctacaacctgaccaccttcgtcaagcacatcgacgccgcggtttttaagacggtacgcgattgcgtcttcgacatcgccacgactctcgagcacctcagcggtgtacccgtcacgcccaatgtggacctgctggccgagctcatggcgcgctccgtagcgcataacctgtacaccaccgtcaacccgctgatcgaggacgtgatgcgcagcagcgccggcagtctgagaaactatctgcgacatacgcgactctgtttcggtctggcgcgtggccgggcgcgcctctcggaggacggcgtgacggtgtacgtggaggtacaaggtcaatacggactacgcgtacccaccacgcgtttcgtagaacagttgcgcgagctggttcgccgcgatcggctgttggccgagaatctgcgcggcttgaacgagcgcctgctgagtgttcgcgtgcgcgtacgtcagatcagcagcgacacagaggaagtaagccgacacgccaagggtcaccgcacggtggcccagatgagcaaggcgctcaaaaagacggcctccaaaatcaaaatgttggaaacacgcgtgacattggcgctcgagcaggcgcaacgttccaatggcgccgtcgttaccgcggtgcaacgcgcgctagccgtctttgacgtactaagtcgcgagaacttggaacgccgcggcgcacagctctgtctgacggaagcgacgagcctactgcaccgacatcgcgcgctagcgccgatgacctggcccgcgggcacgggcgttgcggcggcggccgaagcggatggcgccttacgcgagttcttggaggcgccctgggaatcggcgccccaaccgccgcgactccgcatgacgcccgacaccgatcacgaagaatcaacggcaggcgcgacgtccgtaccggaggtcctgggtgcgcgctacgaacccgcacacctggccgcgagcgacctattaaactggtacatcgtccccgtaagccaggcgcagcaggacatcttgtcttcgatcgacccgcccgccggctcgacatcggtgtccctgccgccggcctcgccatgaaagtcacacaggccagctgccaccagggcgacatcgctcgctttggagcgcgagcgggcaatcaatgcgtctgcaacggcatcatgttcctacacgccttgcacctgggtggaacgagcgccgtcctgcagaccgaggcgctggacgccatcatggaagagggcgcgcgtctggacgcgcggctagagcgcgagttgcaaaagaagctgcccgccggcgggcggctgccggtctacagactgggcgacgaagtgccgcgccgcctggagtcgcggttcggccggaccgtgcacgcgctctcgcggcccttcaacggcaccaccgagacgtgcgacctggacggctacatgtgtccgggcatcttcgactttctgcggtacgcgcacgccaaaccgcgtcccacctacgtactcgtcaccgtcaactcgttggcgcgcgccgtggtcttcaccgaggaccacatgttggtctttgatccgcacagctccgcggaatgtcacaacgccgccgtgtatcactgcgagggtctccatcaggtgctgatggtgctcacgggcttcggcgtgcagctgtcgcccgctttctactatgaggccctttttctctacatgctggatgtggcgaccgtaccagaggctgagatcgccgcgcgtttggtctccacctatcgcgaccgcgatatcgacctcaccggcgtcgtccgagaaagcgcggacacggcagcgacaacgaccaccgccgcaccttccttacctccgctgcccgaccccatcgtcgacccgggttgccctcctggcgtggcgcccagcattcccgtctacgatccctcgtcctcacccaaaaaaacacccgagaaacgccgcaaggacctcagcggtagcaaacacggaggcaaaaagaaacccccgtccacgacgtccaaaacactggccaccgcctcctcctccccctcagcgatagcggcggcctcttcttcgtccgcggtaccaccgtcctacagctgcggcgaaggggccctgccggccctgggccgctaccaacagctggtcgacgaggtagagcaggagttgaaggctctgacgctgccgccgttgcctgccaacaccagcgcctggacgttgcacgcggcgggtaccgaaagcggcgctaacgcggcaacggccacggcgccgtccttcgacgaagctttcctcaccgatcgtctccagcagctcatcatccatgccgtcaatcagcgctcgtgtctgcgtcgcccctgcggtccgcaatcggcggcgcagcaggcggtacgcgcctatctgggcctatccaagaaactggatgcctttctgctcaactggctgcaccacggcctggatctgcagcgcatgcacgactacctgagccacaagaccaccaaaggcacgtactcgacgctggatcgcgcactgctggagaaaatgcaagtcgtcttcgatccctacggacgtcagcacggcccggcgctcatcgcctgggtggaggagatgctgcgctacgtggaaagcaagcccactaacgaactgtctcaacgactgcaacgtttcgtaaccaagcgaccgatgcccgttagcgacagcttcgtctgcctgcgacccgtagactttcagcgtctgacgcaggtcatcgaacagcgacgtcgggtgttgcaacgtcaacgcgaggaataccacggcgtttacgagcacttggccggcctcatcaccagcatcgacattcacgacctagacgccagcgatctgaaccgacgcgaaattctgaaagcgctgcagccgttggacgacaacgccaagcaggaactctttcgcctgggcaacgccaaaatgctagagttgcagatggacctggaccgtctgagcacgcagctgctgacgcgcgtgcacaatcacatccttaacggctttttgccggtagaggacctgaagcagatggaacgcgtcgtcgagcaggtactgagactcttttacgacctgcgcgacctgaaactgtgtgacggcagctacgaagagggattcgtcgtcatacgcgaacaactgagctacctcatgacgggcactgtgcgcgacaacgtaccgctactgcaagagatcctgcagctgcgacacgcgtaccagcaagccacgcagcaaaacgagggtcgcctcacgcagatccacgacctgcttcatgtcatcgagacgctggtgcgcgacccgggcagccgcggctcggcgctgacactggccttggtacaggagcagctagctcagctggaagcgctaggcggcctgcagctacccgaagtgcagcagcgcctacagaacgcgcaactcgcgctaagccgcctctacgaagaggaagaggaaacgcagcgtttcctcgacggactctcgtacgacgatccgcccaccgaacagaccatcaagcgacacccacaattacgcgagatgttacgtcgcgacgaacagacgcgtctgcgactcatcaacgccgtactgagcatgttccacacattagtgatgcgactggcgcgcgacgagtcgccgcgaccgacgttttttgacgccgtcagtctgttattgcagcaactgccacccgactcgcatgaacgtgaggatctgcgtgccgccaacgccacgtacgcgcagatggtcaagaaactggagcagatcgagaaagccggtaccggcgcatccgaaaaacgcttccaagcgttacgggagttggtttactttttccgtaatcatgaatatttctttcaacatatggttggacgactgggcgtcggacctcaggtaacggaactctacgagcgatatcaacacgagatggaagaacagcacctggaacggctggaacgtgaatggcaagaagaggccggcaagctcacggtaacttctgtggaggacgtgcagcgtgtcttggcccgggcaccgagccatcgtgtcatgcatcaaatgcaacaaacgttaaccaccaagatgcaagactttttagacaaggagaaacgtaaacaggaagaacagcaacggcagctactggacggctaccaaaaaaaggtacagcaggatttgcaacgcgtggtggacgccgttaagggcgagatgctctccaccatcccgcaccaaccactggaggccacactcgagctgctcttgggcctagatcaacgcgcccaaccgctactggacaagttcaaccaggacttgctgtcggcgctgcagcagctgagcaaaaaactagacgggcggatcaacgagtgtctgcacggcgtgctaacgggtgatgtagagcggcgctgtcacccgcaccgagaagcggctatgcaaacccaagcctcgctaaaccacttggaccaaattttgggtccacaactcctgatccatgagacgcagcaggccctgcaacacgccgtccatcaagcgcagttcatcgagaagtgtcaacagggcgatccaactacagccatcacgggtagcgaattcgagagcgactttgcacgctaccgcagcagtcaacagaagatggagggacaattacaagagactagacaacagatgaccgagactagcgagcggctagatcgctcgctgcgccaggatcccgggagcagctccgtcacgcgtgtacccgagaaacctttcaagggtcaggagctggcgggtcggatcacgcccccgcccgccgacttccagcggcccgtcttcaaaacgctgctagatcagcaggccgacgcggcccggaaagcgctcagcgacgaggccgatctgctgaatcagaaagtacagacgcagttgcgacaacgcgacgagcagctgagcacggcgcagaacctgtggactgatctggtcacgcgccacaaaatgagcggcggactggacgtgaccacccccgacgccaaggcgctgatggaaaagccgctggagacacttcgcgagctgttgggcaaagccacgcaacaactgccgtacctgtcggcggagcgcacggtgcgctggatgctggcttttctggaggaagcccttgcgcaaatcaccgcggaccctacgcacccgcatcacggaagcaggacccactaccggaacctgcaacagcaagctgtcgagagcgccgtgacgctagcgcatcaaatcgaacaaaacgcagcctgtgaaaattttattgcacagcatcaagaggcgactgccaacggcgcgtccacgccgcgggtcgacatggtccaggcggtggaagcggtctggcagcgactggaacccggacgcgtagccggcggcgccgcgcgtcatcaaaaagtgcaggaactgttgcagcgcttgggtcagacgctaggcgacctagaactgcaggaaacgttggcgacggaatactttgcgctgttacacggcatccagaccttcagctacgggctggactttcggtcgcagttggaaaagatccgcgatctgcggactcgttttgcggaactggccaagcgatgcggtacacgtctctccaacgagggagccctgcccaacccacggaaaccgcaggcgacgacttcgctgggcgcctttacacgcgggttgaacgcactggaacgacacgtccagctgggtcaccagtatctgctcaacaagctcaacggctcatcgctagtctataggctggaagacattcctagcgtgcttccgccaacacacgagaccgaccccgcgctgatcatgcgcgaccgcctgcgtcgtctatgcttcgcgcgtcaccacgacacctttcttgaagtggtagacgtcttcggcatgcggcaaatcgtcacgcaggccggcgagcccatttacctggtcaccgattacggcaacgtagcctttaagtacttggcgctgcgagacgatggccgacccctggcatggcggcgccgctgtagcggcggaggactcaagaacgtcgtcaccacacgttataaagccatcacggtagccgtggccgtctgtcagacattgcgcactttctggccgcagatctcgcagtacgacctacggccctacctcacgcagcatcagagccacacgcaccccgcggagactcacacgttacataaccttaagctcttttgttatctggtgagcaccgcctggcaccagcgcatcgacacgcagcaggagctgacggccgccgatcgcgtaggcagcggcgaaggtggtgacgtaggggaacagagaccgggccgcggcaccgtgctgcgtctgagtctccaagagttttgtgtactcatagcagctctgtaccccgagtacatctacaccgtcctcaagtacccggtgcagatgtcgctaccctccctcacagctcacctacatcaggatgtaatacacgcggtagtcaataacacacacaaaatgccccccgaccacctccccgaacaggtcaaggctttctgtatcacccccacccaatggcccgccatgcagctcaataaactgttttgggaaaataaactggtgcagcaactgtgccaggtaggcccgcaaaaaagcacaccatccctaggcaagctatggctctacgccatggccacgctggtctttccacaagacatgctgcagtgtctgtggctagaactgaaaccccagtacgccgagacctacgcctcggtgtccgaattggtacagacgttgtttcagattttcacgcaacaatgcgagatggtgaccgaggggtacacgcaaccgcagctccccaccggagagccggtgcttcagatgatccgcgtgcgacgccaagacacaaccaccacagacacaaacacgaccacagagccaggacttttagatgtttttattcaaacagaaaccgccctagactacgcgctgggctcctggcttttcggcatacccgtgtgtctcggcgtgcacgtagccgacctgctgaaaggccaacgtgtattagtagcgcgccacctcgaatacacgtcgcgagaccgcgacttcctccgcatccaacgctcccgggacctcaatctcagtcaactgctccaggacacgtggaccgaaacgccgctggagcactgctggctacaagcccaaatcagacggctacgcgattacctgcgtttccccacccgcttagagtttattcccctagtcatttacaacgcacaggaccacaccgttgtacgcgtgctgcgaccgccctccacgttcgaacaggaccacagtcggctggtgttggacgaggccttccccaccttcccgctgtatgaccaagatgataacacatccgcggacaacgtcgctgcgtctggcgccgctccaacaccgccggtacctttcaaccgcgtaccagtcaatattcagtttctgcgtgaaaacccgccacccatcgcacgagttcagcagccgccgcgccgacatcgtcatcgagcggccgcggccgcagacgacgacggacagatagatcacgcacaagacgatacatcaaggacagccgactctgcattagtctccaccgcctttggcgggtccgtctttcaagaaaaccggctgggagaaacaccactatgtcgagatgaacttgtggccgtggcacccggcgccgccagcaccagtttcgcctcgccgcctatcacggtgctcacgcagaacgtcctcagtgctctagaaatattgcgactagtgcgattggacctgcgacaactggcgcaatccgtacaggacactattcaacacatgcggtttctctatcttttgtaaccgacactgacagtagcgggcaataaaaacaagaggattgttatcgttttttatgatacaaaacaacgtgtcactttcacggtgatttattcttgctattacttttccccatgggctgtcagcgtcgggtgcgcgacacggctatcatgcgcaacaggtccagcttaaaggcgcacttgtcgttaaacagactggacatgcgcgtatacttgctcagcatggtggccagcaccgggtgggtggcctctgagatctcggtcggcaactccaaaacgacgttgacgacgtgacggtgtttttcgtcccgcttgttggccaccgtgggtcccggcgcggtgttagacatggggcaggccgtggggggaggacgaggaggacgtcgctgctaaaccgccgcgcgcctgctgcacaatgtggccgccgacgtggcaggcggtctgtttaaccagcgcgcagcctcgacacagcggggcgccgtcttcgctttccaaacagctgtcgcggtactcgcccgtctgacagcgcgcgcacagcaggccgtgcccgtgcgaagtgagacgcaggagacgcgggaccgtcacgccgcgtaccaccacagtggagtcgcaggtgcgtgccgcgcagggcagaatgacgtcgaaagccagccggtgatcgtacacggcacaagccgcgttgaggcccagcacggctttccagcccacgcgtacgcagcgctgtccaaagagcgtctcggagacgagctcgtagacgcgctgccgcactacccgctgactgccgcagagcgagcagtgtacgagctcggcgtgcgtgttgaagatgacgctcttttcttgacggtcccgataatagaacatcgagttgagcggaaaattttgctggcagtgtagcttttccttacccaggttgaggcagtgtccgcactgccgacagaccacggccaccagcgagcgcgcatccagatggcgctcgcacttgagtcgacacagacaccagagcggcaggtcgatgacgctgccgatgaggccgccgcgcagcgcggcgctgagtgcaaagaggacgatcttggtgggctctacgtgatgcgcctgctgtccggcgcccgcgtgtcctaccgccgcagctgccgccgtcgagcctcctccgcgcgtctcgtcgtgcagacccagtgcccgcaacggcaccaggtatcgcggacacgtgtcgcaaaacgtctgcaccgcttgtcgggccagtacgtagagcgggtttccgcagggtaccttcccggcgtgccgacgcaaggctgcgatgaggccccgcagctgcggcgaccgcggctgccgttggtgacaccactggttacggtggtatacggccaaatcagcgcgggcgtcgaagcgcttggcgcgtagtagtgctaggcacggcgagctggtggggtgaagcacgggcagccgaaggtccaccccgaaaaggaaacggtgaaggtcacctagcagcgagacggtgacaccgtccaacaacgcgtgcagccgctcgggcgggtagagccgcagacggcgcagcaggtagtcggtgtcgtagcgttcgaaacgcagaaaggccatcgtgcggacggccacggtgtgcagacagtccatgctgtagacgtaagcgagaaacacaaagtagggcttggtcataaccatacgctgaaagagcgccgtcaccgcctcccgctcggcctgccgacacaccagccattcgcgcaggaagcgttggtagagacggtcgcccagctcgcgattcagaaagcgcttatccgtcacgaagagatgaaggacgcaagaacgtggcacgtgatgcaccagctgctgctggaggaccgccgacgtctgcgccgcaaactgcgccggtggctgcgacgtttctaccgccgcttcctccggctgcagcgcaccgcggccgatcaccagctgcacatggaaatggtcctcgtgaacgcagaggggcgcgaagagacggcgcagagcctggtggaactcatcagtcgcggtgtgcggagcgtgtcggagacgacgattggccatgaccgcgccacagcagagccagcaccagcagaagagccagcaccagcgggcccagagtcgcaaagcgcgcgggcagccacggcccagactgcggtcgcgatggcccggagcgcgctcgccaccacgatgacggtgcccaacgataaccagtccgctccaaggacggcgtgcacggcggagacggcggatgacggtgatgggtcgacacccctcgccgacgactcacgtgctcctccagaggccgacgcgcggaccctccgatgtcctggcccgccgctgccgctgccgccttcccttctcccgccagagccagcaactcctcctcctcttcatcagcgtctccctcgcttgcgcatccgcatcgtcccatacaggcctcacaacgacacagccgccacgaccccgccgccatgggtggcggcggcggccgaggcccggcagcggcgccgccagcggcgaccatggtgggagagcaactcggatgacgaggaggaggaggagggggagatgcggtccgaggggaccgctttcccgccgttcgcgtgagcgcggccgacatgcgggcgcgccacagagatggaccactgccgctgtgactgcttacggtgacgtggttccggaccgccaacgacgtcgacgcggctttcttggcgtacagctcgcgcagcagattctcgtactcgccctcgttttcgggtccgaaggcgatgagctcgatgttgaacaccgacgccgaattggatttgcgcaccacgcacttcgtcagcactccgtaggccgagggcttgatctcctcgatgtccttgagcgtgacgatgagcgactcgttcaccttaagcacattgaactcacctacgtggcgcgccggcgagacgagcttgacgggcgctcgcacaaaacagcagagggagacggcgcagccagtgtttttaaagataaaacaaggcacgtggtctgtgcggctctcccagtagctgagcagatattcgacacaatagaccgtgtctgtcttgagcatggcgtcgcacaccgagtaattgggatttttacagataaggccggcgtcggtgacgcgcagctcgctaggacccaacttgaggatacgccgcgtggcctgcaccagatcctgatggagaaccttgttcatctccatcgcaccgacgccaccgccgatttatttacccggcgccggctcgtcttttccctccaggattccgttaatgtccatgagcttgctgacgatcgccgttaatagttgcgtcttctcacggaggatctctccgtgactgcaggtcgcgcagtcgccgtgcacgtacttgaggaaggcggcgtacttctgacccgcgttcacgaaatttaagcgcgcgtccagagagggcagcaacagatcgtagacgcgcggcagcatcggctcgaactgtaatagcagatcgtcgtcaagatcgggtagcgcgtgtccgtcttcaccgtcctcgtcgtcaccacctcccccctcgagcccaccgctcgtaccagccgcgggctccgcgtcctcgtcgatcaccagcggtcgcgtcggcaccggagaatccacgtcatcctgcacgtcgttttcctcctctccgtcgtcatcgtccagaaacggcacccgctgcttagcccaggacattctttttccgcgtcctcaatcagcggcgccgatcgccatgaatccgagtacccacgtgagcagtaacggcccaacgactccccctcacgggccccacaccacgtttcttcccccgaccagcccggccccgtccaccagctccgtcgccgccgctaccttgtgcagtccgcaacgacaggccgtttcgcgttacagcggctggagcaccgagtacacccagtggcactcggacttgacaactgagctgctatggcacgcgcacccgcgtcaagtacctatggacgaagcgctggccgccgcggcggccgcctcataccaggtgaatcctcaacaccccgccaaccgttaccgtcactacgaattccagacgctcagcctcggcacctcggaggtagacgaactgctcaactgctgtgcggaagaaaccacgtgcggcggcacgcaatccaccgtactcaccaatgcgaccaacaccactagctgcggcggagccgtcgccggcagtagcaacgcaggacccgccggcgcttcggccgcctgcgacctagatgcagaactggccggcctcgaaacctcggcggccgactttgaacaactgcggcgactgtgcgcgccgctggccatcgacacgcgctgtaacctatgcgccatcatcagcatctgcctcaaacaggactgcgaccagagctggctcctcgagtacagcttgctgtgcttcaaatgcagttacgcgccccgtgcggcgctcagcacgctcatcatcatgtccgagtttacgcatctgctgcagcagcacttttccgatctgcgcatcgacgacctgttccgacaccacgttctcacggtcttcgatttccacctgcactttttcataaatcgttgctttgaaaaacaagtgggcgacgcggttgataacgagaatgtcaccctgaaccatctagccgtggtgcgggccatggtcatgggcgaagacacggtgccttacaacaagcctcggcgccacccgcaacagaagcaaaaaaacaacccttatcacgtcgaagtgccgcaagaactgatcgacaactttctagaacacagctcacctagccgcgaccgcttcgtgcagctgcttttctatatgtgggccggcaccggcgtcatgagcaccacgccactcacggaacttacgcacactaagttcgcgcgactagacgcgttatccacggcctcggaaagagaagacgcaaggatgatgatggaagaagaggaggatgaagaaggaggagaaaaaggaggagacgatccgggccgtcacaacggcggtggcaccagcggggggttcagcgagagcacgctaaaaaagaacgtgggtcccatttacctatgtcccgtacccgccttttttaccaagaaccaaactagtaccgtgtgtctgctgtgcgaactcatggcctgctcctattacgataacgtcgtcctgcgcgagctgtaccgccgcgtcgtctcgtactgtcagaacaatgtgaagatggtggaccgcattcagctggtattggccgacctgttgcgcgaatgcacgtcgccgctcggcgcggcgcacgaggacgtggcgcgctgtggactcgaagcgcccacctcgcccggaggcgactcggactatcacggcctgagcggcgtcgacggcgcactggcgcgacccgacccggtattttgccacgtcctgcgtcaggcgggcgtcacgggcatctacaagcactttttctgcgacccgcagtgcgccggcaacatccgcgtcaccaacgaggccgtgctcttcggacacctgcacccccaccacgtccaggaggtgaaactggccatctgtcacgacaattactatataagtcgacttccgcgacgtgtgtggctctgcatcacactcttcaaggcctttcagattacaaaacgcacctacaaaggcaaagtgcacctggcggactttatgcgcgatttcacgcagctgttggagaattgcgacatcaagctggtggaccccacgtacgtgatagacaagtatgtctagcgtgagcggcgtgcgcacgccgcgcgaacgacgctcggccttgcgctccctgctccgcaagcgccgccaacgcgagctggccagcaaagtggcgtcaacggtgaacggcgctacgtcggccaacaaccacggcgaaccgccgtcgccggccgacgcgcgcccgcgcctcacgctgcacgacctgcacgacatcttccgcgagcaccccgaactagagctcaagtacctcaacatgatgaagatggccatcacgggcaaagagtccatctgcttacccttcaatttccactcgcaccggcagcacacctgcctcgacatctcgccgtacggcaacgagcaggtctcgcgcatcgcctgcacttcgtgcgaggacaaccgcatcctgcccaccgcctccgacgccatggtggccttcatcaatcagacgtccaacatcatgaaaaatagaaacttttattacgggttctgtaagagcagcgagctactcaagctctccaccaaccagccgcccatcttccaaatttattacctgctgcacgccgctaaccacgacatcgtgccctttatgcacgccgagaacggccggttgcacatgcacgtcatcttcgaaaactccgacgtgcacatcccctgcgactgcatcacgcagatgctcacggcggcgcgcgaagactacagcgtcacgctcaacatcgtgcgcgaccacgtcgttatcagcgtgctgtgtcacgccgtctcggccagcagcgtcaagatcgacgtgactattttgcaacgcaagattgacgagatggacattcccaacgacgtgagcgagtcctttgagcgctacaaagagctcattcaggagctgtgtcagtccagcggcaacaacctatacgaggaggccacgtcgtcctacgcaatacggtctcccttaaccgcgtcgccgttgcacgtagtttccaccaacggctgcggcccctcctcctcgtctcagtccacgccgcctcatctccacccgccgtcgcaggcgacgcagccccaccactactctcaccaccagtctcagtctcagcagcatcatcaccgtccccagtcaccaccgccgccgctgtttctcaacagcattcgtgcgccttgacactgtacggcagaaaagccggctccaagtgcaagcgccgcggcagcaccatgtgcaaaaacttgtccttgcgcgcggtttcgccgccgggaaagacgggcgacagcacgttggttacagccttgagaacctgctcaaagtacttgtcggcgtgaatgggcacgccgtgctcgcgcacgtagctcggatcttcggctacctcgtagttgcacacggccgacggtggtttccgcgccctcttctttgccggctctcctcctctcctgttgctctcctctaccccgccgccgtcagcgtcgtcgtccgtgccatcaatcgcgtccgaccgggaaaccacgccggtggttacagaatcaccgttgtcggaggaaccctgcggcgccgcccggacaccgggcgccgtcaggacgtaaaagacccgatccccgaccgagggtagctcctcagaacgggccgccaatcgcttaatgacggcaatgtgcggcaggttagattgacggtacaacgagatgtccttagaaagcaccgacgaaagcaccaggtcctcaacacgcacacggtgcaggtacagatcgtcgcgggcctgcaccaggcggcgcaagatacgccagaaaccgcgtggcacaccgtatttcttaacttcatcgagtgagaggcgcgacaggcgcacggctgcttccgagacctcgcgatcctcaaagagcagcgagaggacgtcacgcgtgacgcccttgacgaactcgcaggccgtcttgcgcaccagatccacgcccttcatgctcagacccgaggcgccctccactttgccgatgtaacgtttcttgcagatcatcataagagagacgaagaccttttcaaactccagcttgacgggctccacaaaaagacaagccgtcacgtagtgcgccaggctgggcccacgcgccaccagagcctgcggcgtcaggccacgaaagcggacaaacacgctgtccgtgtccccgtagatgacccgcgcctccacccgccgttcgtttaagccccctgatgatgtttcgagcccctccggtaacgtgctgctctcctccgaatccccctcccgcgttcctactacatagtcttcctgattaaaaaaattgtgcaaaaaacacggctctgaaaagttgtctttgatgaaccgcgccgtgcgctctagcatgtcgcgaccgatgcgcgtaatgctggcggcgatgggcagacacggcatcatgccgttgaccacgccggtaaaaccgtagaaagcgttgcacgttactttgagcgccatctgttccttgtcgagcagcatacggcgcacggggtcttgacactcgcgcatgcattcgcgcacggcacgccgctgcgaaacccacttgttgagcagttccgaaagcaccgagacgcgcaccgaagcacgcacaaagcggtgtgtcacgccgttctctagcgtgacgctgtatacgtcggcagggtccacggggtactcgccacccggcaccagcagggtggagtagcagaggttgtgagccatgatgatggaagggtagaggctggcaaagtcgaacacggccacggggtcgttgtagtaacccacctcgggctcaaacaccgtggcgccctggtacgaaaccgccgcagtaccaccggcgccgtgattgtcgttggaaacgccgacgccgccactactgccggagccgacgctgaaaacgccgacgctgctactactgttactgccggagccgggtgaaacgccgtcctgactggacggcgcagattgcaagggcggcgacatctgaaacatagccgccacagaacccgcgtcgccgggcacggcggcggtagagatgatagcggcgttaggtgacacggcaacactattcgtttcgggcaccgtcgtacctttgctgtagtggttgggcaggataaaatcgcggcaggcgcactcgtccagcagcgaggtgtagatacggatctgctgtccgtcaaagatgacacgccgcaacggaattttagccagccgcgcgatggccccggcctcgtagtgaaaattaatggtgttgaacagatcgcgcaccaatacggcgtcctgcagacagtaacggcctacctgggcgcggccctcggcattagccacgaaacaacgcgggatgtccttgtaggacaggtcatccttgcgttgccgcaggtaaagctcggccatagtgttgagcttatagttgggcgagttagtcttggccatgcatacggggtacatgtcgataaccaccgaacccgcaatatacaccttggtggcggccgtgctggccggattgttgtgagaagccgagggaaaggcggcggcgtactgccgcttaaaacccacggcggggctgtgtaaaaagaaacggccgccctgcgccgtaggcaacttgcagaagcgctgcgagtccaccttatacaggtactcgaggcgcgtgaggatgtacttcaagtcaaaagagttgatgttgtaaccggtcacaaaggccggcgcgtaccgttgaaagaaaagcataaagcccagcagcagctcgtattcggaagggaactcgtagacgtccacgtctgggcccacctgcccgcaggtgccgatcgtgaagagatgaagacccgagtgcccaaagatcacaccctccgaagtgcagccccggccatcgttcccgtttgggatcccctgatccacggcggtgtttccccccgtctcgtagcacacgcacgagatctgaatgacaatgtcatcggacttctcggcgcagggaaaaccaccctcgccgctcatgcactcgatatcgaaggacaggcatcgatagcgcggccacgagctgtcgtcgggcacggccaccaggtcagagacatcgcagtcgacctcgatatcacaagtcgacgcgcgaccctgctgccgccagtcgtaacgattcacggagcaccagccgaacgtggtgatccgccgatcgatgaccaaacgcgtcagcggatccacacggacctcgtacacgggaaaaccctgctccagcagatactcgccgatttttctggccatggtccagttgctgatagacacacactgcaaatcgggcacgggtcgcgtcccgtacccgtagatcgaggttttggtggccggcgtgacagacacggcgtatggcgtccgcggttcgggcactagttcgcccacgctggcaatgacctcacgcagcctatcggtgtcgctgtactcacagtaaaagtagctgcgctgcccgaaaacgttgacgcagatactgtagccgtgttctgtggccccgaagaaacgcaacacgttccccgaaggcaccagatgctgacgatagcgcggcgacacgttttcgggcgagtcgaagaagagcacggcgtccgtctgatcgtaggtgtgaaaacgaataggtcccaccacgcgacccaccagggtctcgcgccaaggacacggccaaaccatgtcatgactcaacaaatgtttaatctctcgatagaacatgagaggcagccgtcccgttttatgcttgatcaaccccgtctgaccgtcgaacatgacgcctcgcggcacgatctgcaaaaactgtttctgtggcggccgcttgcccgagccctgcgcggagccgggctgcgaacgctgacgccggccacccgcgaccgcaccgccggtcacgccgccgctcagatacgggttgaaaaacatagcggaccgtgagaggctgacagcttacgaagcaaaatcacaaagaaaatacacatgcagcacctagatatccagtttaaccccgtatatcacaagtctctgtgtcactttttttttgtctgttttttttttcttctcctggttcagacgttctcttcttcgtcagagtctttcaagtgtcggtagccgtttttgcgatgtcgcagtcggtctagtaggttgggcttctgtcccttgtcctgcgtgccagtccgtccgtccaaagaatctgtaccgttctgctgcgctcgctgctctgcgtccagacgggccagggccagaagcatctggtaagcctgctcgttggtgtaaggcggagccgccgtggatgcatcagacgacggtggtcccggtcctttgcgaccagaattataaacactttcctcgtaggaaggcggagcctgtaacgacgtgtctttggtgctgcccgacgtcacggtggtcccgtcggcggacaccagatagggaaagaggttctgcagcggctgcgtgcacaaacgccgctgtcgagtatagatcaaataagtgataatgactacagctatggccacgaggatgatggtgaacgctccgaaggggtttttgaggaaggtggcaacgccttcgaccacggaggccaccgcgccacccacggccccaatggctacgccaacggcctttcccgcggcgcccaggccgctcatgaggtcgtccagacccttgaggtagggcggtagcgggtcgactaccttgtcctccacgtactttacccgctgcttgtacgagttgaattcgcgcatgatctcttcgaggtcaaaaacgttgctggaacgcagctctttctgcgagtaaagttccagtaccctgaagtcggtattttccagcgggtcgatatccagggcgatcatgctgtcgacggtggagatactgctgaggtcaatcatgcgtttgaagaggtagtccacgtactcgtaggccgagttcccggcgatgaagatcttgaggctgggaagctgacattcctcagtgcggtggttgcccaacaggatttcgttgtcctcgcccagttgaccgtactgcacgtacgagctgttggcgaaattaaagatgaccacgggtcgtgagtagcagcgtcctggcgactccttcacgttcatatcacgcagcaccttgacgctggtttggttgatggtcacgcagctggccaggcccaagacatcacccatgaaacgcgcggcaatcggtttgttgtaaatggccgagagaatggctgacgggttgatcttgctgagttccttgaagacctctagggtgcgccgttgatccacacaccaggcttctgcgatttgcgccagcgcccggttgatgtaaccgcgcaacgtgtcataggtgaactgcagctgggcgtagaccagattgtgcaccgattccatgttggataaatgagttgcattgttgccatctgtacttcttttggttctattatgagtaagattcagactggagcggttggccaaacgttcgagttccaccagagatttttgcttgataccttgccagaacactaccaaaccaccagtggtttcaaagacggacacgtttccatatttttcatatgtttgattgtatgaagtattgaaaatctgctgtaacttatttatagcctcatcacgtacgcagtccagcgcagagtcggacatgttcacctcttgcttcttagataagaaagtggcggtcattttggcagaagaaaagtgatacgagtcctcggcttcggaacgaatggtgcgttccgaggcttcccagaaagtgagttgacaagtgacattcttttcgtcctgtatatcccaggagatcaccgagtccgcacgttcaagaaaagccaccaacctgtgggtctctaacgcagaattcggtcttccaaagtcggagacgatagtgtagttcggaaaaatgaaaaacttgtcggcgttttctccaaagtagctggcattgcgattggttccgttgtagaaaggagaaatgtcaaccacgtcacccgtggaagtggcgaaaaaatgataaggatatttggagcgcgcagtagtgatggtcaccatacaattcagattacaggtctcacgatagagccaggtgctgccgcggctgtgccattgatccttgaccgtcacgtaacgggtactgtgggtgttggaataatcgtcgggcattaattgcatggttttgttttcatagctgtccctatgataagccacgaaaaccgtgcctgctataacgcggctgtaggaactgtagcactgactgtggctgttgatatgatgaatctcccacataggaggcgccacgtattccgtgttgctgcccagcagataagtggtgtggatgtaagcgtagctacgacgaaacgtcaaaaccttctggtagactcgtaccttaaaggtgtgcgcgacgatgttgcgtttgtagaccaccatgatgccctcgtccaggtcttcattgatgggcttcatcgaggtgcagacgatattacgttcaaagcgaataagatccgtaccctgggccatagaacacacgcgataggggtacttggtggtattgacccccaccacatctccgtacttgagggtagtgttgtagatggtctcgttaacaccatggctgaccgtttgggaagaagttacgcgttgagagactgaaccggatcgagagtgagcagcagacgtcgtatgagaggaatggtgactgtgagtagcagaagttccacgagtagaagatgaggaaaccgcagcacccagacagacgatacacaagttaacgcagactaccaggcaccagatcctggattccatgttcgtcgcgggccaaatccagcagcgatgaggcgcgtcgtggtctcttgcgtgttgcgcggaccctccgggaaacgcccgcggtcgaggaggaggggtacggacttggcagccaaggtcggtccggctccctgaaggcacccgagacggccgcggcggccgtcagggtggagggcttggccacgggagctgttggcacgtcgccactctcatccggtctggacagatgcctgtagaggaggagatatagatctttggacttataaagacttccttcgtgacgaagcagcagcggccactctttgttatacgtgagaatcacatctctgtccgggtgcagttcgtcgcgcaggcacgcgatcgagagttgtttcccgaaagtttcattatatagtgcgacggagagcacgagctcccgcacgtgcatccacatctccttctgcagcacgtttaggtcctgacagtccgaaaaattgaaaaaacccatgtacttcaccaccatccactcactgggatacacggtaccttccgcgcatttgaccaaatcgtccttgacgtggggtagtacgcccgcgttgtcgcaggcataggccatgtccacattgtgagagaggggatagcgatcggtacagtgtgtgaagaggggcccgttacacaactcgtagatctgctgacccagtagcgggagggattccacaggcagactcttgtggatcaggttattgaccacatacaggtgctcatcgtacgtgaactgattccccacgtccaccacgtcttggtcctggtggtattggctgcggtatagaaacccattcatgagcttagagataaagtccagacacaagggccccactaggttgacatcgatgagtttgctagtcagacgctcctgcgttttgatgcaacggatcaccttgccatagcccacctccgagaccttctgcaggtaggcgcgtttgcgcacgttcacctcgcgggtgacgttgtggatgcgggaacgcgcgtccaccaagtcgagagcttcgtgttcgtcgcagttgcgcacccgtaagccgttttcgctgccgtcgccgtcctgcccattcgcccctccccctacagctttcttgcctcctccacgggcccggccgccgccaccgttattcctctgactgtgagtactgctgttgctgctgttgctggccgtcatcaaagtcgtacccgtccccgacatcgcctcccgtccacgcaggtgaataacctcgccctcggggccgtcgccccccgtgccatcgggcagcggacgtcgaatctcctcgagaatatgcttgattttggtgtacatctcgttgctttcgtggagcttgttgaacaccgggttgtcctcgaaagcttgaatgctgagggatgtgatgaggtcgatgatcctgttgggggcggcaaagaccgaccccacgaacatgcgctcctccccgtccaacgccttttccccgagcacgaagatgtcctccacgtcctccccgtacagatggcgactgatgccgttcatgagcgcccggcacagctggtgatacacatttagctgctggatggtgatgcccacccgcttgacgataacctccgaggtacgggaccagtaggtaaaatccgacaaggaatatattcgttccggtatatccgtaaacaggttgtactccctcagcgcctcctccgcctcctggatgtagctgtggtaggccgatgaagaagagaataggcttttgagggccgaaaggactccagccaagtgggggatgcgcgttgtcaggtccagcaggtcctgctccaccgtctggatattcacatcggactggcttgacggacggtggaccgctatatggttgcacagcaagccctgcagccgcttgttcagcgagcggccctgattcgggatgatggtcagctcctcgtagcattgggcgcatgtcgtcccttcgacgtacacttcctgacgcgccaccggcgagatgccgcataggcgacggaggagctccagcagctgcgcgcagacctccaggccggcctccggcgccaggatcccgtacacgtagttcattttgcacaggaagcgctcgatgtcgttgagtgtggccagactgacgctgaaacggacgttgtccgtaaactggagctccacggtgtgatggcgatcgcagcgatccaaacggaggacggtacggtagaaggccgcccggtccggctggcgcgagtaggccatcagcgcccgatccagcaaagccgtatcctcgtgcagcgccttcagcagcatctccagatagagagtcagcagcgaactctgcgtacgattctgcgccaccacctccgggtagatcttccggtacagatacactatagccgccgcgtttctcttgaacggcgtggactccgccagtaacacgttcggatcgcagtactttagacactccagctccatggcgtattcgttgcatttcgaacacactacgcatagtttctgtaacaaattcatctccatgactcgactcgctcacgtacgagacgctgtcgtccggtctggcgccggccagagacatggagtcggtgcacaaataactcgcgggccgctcgctatgccgactgacgttgacgttaatatataacgacgtcgtcgacgacgcgggttctgctcccgaagctgttgccgccgcttgcggcgcaacctcctccaccaccgccgccgccggctcctccgcctcgggcgacgggggctcggagatgaccggctgtgtctgacactcctccccttcctcaggcggcccgggcgccgacgcgaatgtcggagtttgccagcgcggcggcggtctctgtctctggtgccgcggcgctaaccttcggggctgttgctgctgttgatgatgcgacgccgtccgtcgccgctgttgcggcggtagctgatacggtgtcgcctggtgctgctgtgtcggtggctgctgttgctgctgttgttgcggtctgaaaagcggccacgggggctgcgactgttgctgctgttgttgcgatgctcgtggctgcggcggccgttgtcgcggcgtttgctggcggttacaaccggctgcgtttggccggcaataacccgctgcccccgccgcccccgctgctcccgccgacgccgccagcctcgtcttcgccggcgttcacgagaaagcagccacctcccgtctcgccgggcacgccgaagcaaatggagttgcccgcgacggactcgccgagaagaagaccgccacccccgacgccggacgccgcgccgacgccactgggcgcgaagagcgccgacaggtcgtgcacctcccccccggcggcgtccgttaatcgctgggcgtcggcgtccagcacgcgtcgcaagttctccagcgaaaagtcctccacgccctgctcctgcaacgcggcaaacttgtccatcagcgacgcggccagcgcctcgcagccatccacgaagaagagcacatcgtcggacgcggggatctcctcacgcacgctcaaaatctcgtacacggccatcacttcggggtcgcaatccaagttctcggcgtccagcgccagcatgacgcggttttttataagatccgcgtcaaaaagcacgttctcgcggcgcgagcgtttgatgagcacgtcggccagacgcgtagccaagagatagcgctggcgcatgaaacgataatcttgaccgctcatagagctcacgttaaggctgcgttccacaccgttgcccgaaaaatagccgatctgcccaaactgatagatctccttgctgttgttgataccagcatatttttccacgctcacgggcacggtcaccaaggaacgatgctcaaaaacgctccgtaccaacgattcacgcgccacagtggcggccatgggcgccggcacgcctgcggtcttcaagcccttgacatgcaacgcaaattcggcgggcgacgagaaacgcggactagcacctaacacgtgaggaaactgcgcgtggttctgcgtcgttaagcgcgtcgttaacccgtgcagcgagccgatgtagtccttgaagccgtagtagcagaggaatttgttatggaaacggctttccacgtaactcagcacacagtctggcgccacatccagcagatcgtgctcctgatagtcagccgtcacagccaccagaaatttgacgaaagcattgaactcgcccatgtcacctatgggcacattcttgggcaacgcgttggaacaaaccttctgccaaaactgtaagcaggggagaccacattcaggaaagagtcgctcgtgatgtcgatacagcagaaatcccaagcagcccttagccggattacgacgcggaacgtgatcgcggcgaaaaaacacgctacccgcgttgcccttgcccgcgcggtagatgggtcggtttttcacccgcaccatgatcaacgtgggtaccgatagccgcgagagcttgatctccatgggcaccacggcgtacgtgccctgcgcgtacagcctaaagtccagcaggcggtcgtgatccgaattcttggacgacttgatctgcttggtgaagagaaagcccttgcgcgacgacgtggtggagaacgcgccgtgaatggattgaaaatgctgcgtcatccatttggataccaagttggtggtcaacggattgtccacaatgtatgaggtagcggtaataagcgccacgttctggatcacgtaaaagacggatctgaaataggcgtaggccagcagcggctggaaggccacggcgtagggattcagatccaggttgaaggcctgcgtggcgcccgccacctcgtcgcggctgctcttgaggcgcacctccgaaacgaaacccagggcctcgtcgtccacaaacttgttgagcgccgaaaagacggccacaaagtcgcttttgccgtgcgcgctaaaggtatcctcgcccgtcacggggtcgatgagccgcatcttgcggcagtaatccaagatgcgattgagccgataggtacggtccacgctagcgcccagcatgcgaccgccgcgccccatcattcccccggaatccccgccacccccaccaccacgaccgccgcccagaccgtcgctcgggcccccgctcacgtcccgtccaccacccccgccagcaccgccgcccggaaccccgtcgtcacctttgccgtccaaacccccgtccttggcgtcgacgttgtaacgccgaccgaagctgcccaaaatatccacgtcgttgagaaaacgcgactgcacggtgatcacgcagggctccttcttgggctgcttgggcaccacgggcaagcgggtgcgcacccgcacgaaggccgtctgataacacgtgtggcaacaagtacccccacaggcctcgcacagccccgcggcgcagcccaccaggtgattcgtgagcgtcgacgaacccgacaagcccgtgttatacaccgagacacgatttagataccagacgaagcccgaaactagctgcggacacgtgccacacaccaacgccaaatgctgcggcccatagcgttcgtccttgagcggcgcgccttgaaacttgagcaccttgcgcgcgtcgttgtagacgtcttcgcaggccgccgacaacccgttggtgaactgaatagccttgagcaacgtctcctgactggccgtaccgccggcgctgggatgccgcgccgacgactggagatacaccagcctgtgctggtagagcaccgaattagcgctgaagaccaaggcggccacgtgcgtcgagagatgcaacttgagctcggtcagcgcgcggatcagatcgcggtgatcggttgcgttggtcactaaaggccactcggaaaagagcatagactcggcaggttggtaggccgaatcgaaaaataccgaggcaaaactgaaggccaactcgcaaaccaccgcgtcactcagcatcagatgatccttttccagactgctgagtcgctggctcatgtaccccaagtagcgcttatgtggcgccagcttcaccgactgctgactgtcgtgcacaaactgccgcaacgccgcctcgatcagcacacgcggctccgagaagcgcagcgattgacaccatgacgtgtacacgtagtagaaaagcgtctcgcttacggccggcacgtagagccctcgcgcctccacaaaagcgctgcgcgcatccagcgagacctcgtcggcttcggcgtcaagctgcagcgaattaaagagcgtaggcgggtacaacggcacgcgcaccgcctcgccgccgtgcagtcgcaccgtggtcgcctcctccacgcatggaatcagctgaccggcaaagagaaactccttcaagccgttgcccaccaccacgtgcacagtcgtctcggacgcctgacagcccaccgccgcgcacaacgccgccagatcggtaggcacgcgatccgcctcgggcgtgtaggcctccaacgcgtacttctggcgggcgtcctcgcacagccgatgcacgtctccgtgatcctcggtaaaagccacgatgccttgcgtatgatgaaagtagagcgcaaaaggacagaaggacgtgactttcgtgagcaccccgccgtcgtaacaaagcacaggcgtacgcacagagacgccgaaatccgcctccaccgtgagccccgccaacagaggagcgatcaccacgctcgaggaacggtcgcatagcgagagagtggccagaatctcctgcgtttctgcgttcaacctgctgaagtagagaaaagccgcgggccccaccggcgctagcgcggttagttcctcgtggctcatggtggatgaacggaagacaatggctacgccgccactgagtgaattttataccaaggaaaagttcagcacgtcatgtttgacgcacgacgtctgagacaccaccgtggccaccactgcggtctggctgcggttgcggaccaccaaaggcgacaaccgcaacgatcccagcaattcgtaagaaaagctaaccgctacggtcgggtagcctctcgcagccagaccgctagccgacgcacccgcccgcgaaaatagcgtgatgttcgggacggctttgcgtcaccgccaactaacgtcggtagtcgagcacgtcgtttatcctcagcacaccgtccgatcacaatccgttttcccactcagtcgcacaagcagcacataaaaaccccacacagggcacgtgaaaacaccgtccctagaaaacggtgttttctgtcctaccgtcaccggtatacacaggcaaatcccaagcccgatccccgaaaacaccgtacggtgtttgtgacctccaaaatcacatcagctaacaaaccgtgaaaagtcacgtttcacgaacacggtgtttttaaatcacaaagaaccgcctaacggtttacaagcagaaacaccgcaccacggtggtacaagcgcgatgaatctggtctcgcaacctcaatcgccgctatcaccaccgattttcgctgcgctccgccgacaaaacgtcgtacaagctacacaccccaaaaacccgcgcgcctacgggcgccaaacctgtgtattatctcaacgtcacaacacgacacaaaccgcgtaacgtggtttcccgaacacgtacgcggcacagacccccgacacgtactcgaagaccttacagtttacgagtcaataaaacaggaaaagatccgaactttaaaattgtgtatttttattttcccatccccctctttttaccaaaaaacacatttttcgtcttgtaaaaagtaactttcgcccattgccatgaaacaccgtgatggggaacggtgttgtgtgtcgactgacgtcactacggcgatcagtatcgacgtcgtgtatacataacggtgcccggtgtttttattcggggcgttgtcgcgtcttgatgtagtgtaacctgaaaccgccgtgcccaagaatgcggaagccagcgtgtaatcataacggggttttgggtacaatctgacgacatctggcggcgagcgtacaccatcgaatgtggcgatcgccggctctacgtcacaatgacgcaaaaacacactgtaaaacccgcgtagacagctttcctggtcaacgagcgccatctggtgtcggcataagaacaggcatcaaccccgtggccggcgaggcggtgagcacttttcctggtcacgtgaccatcagtgcaggaagcgaggcccgtagaaccgcccaagaggcggtgccagatgccaacgtcataatcacaaggtgatttgttacgtcacgcgtgtgcgcacacgcgcacgcgcgcacacgcgcgcggtagaatacagcgatccctagtgaagccacacccattacgtgtagccatatccgcttacgtatacaaccacacccctaggtacgccaccttatctaccaatcacagaaacggatatacaatgagccctccctagactccaccccttgtacggaaatttcagataggtggaacccgttagggttccaccgtcctcggtgtacgtacaggcttctccgtctaccggaaatatacacctgctgacgtagacgctactcccggatacgcgtcataagctactggaccctaggggggagtgtctacagggctacgtgcacgtccccttacctagggtatccgcccccttccgctgttttggcctagtaaacttaacgccgccgcttctcacgtgacccctgacaagcccacgtcacactcgcgtagccacacccactccggatatacgtcatcctgtggacttccggacatacggtgacgtagcgagcgtagcgagctacgtcacgtatgcgtacgtcatctccggcggaaatcatctctgatgacgtagcgagcgaagcgagctacgtcatcagtccgttttacgtataccggatgctaggcgacgccccgtaggggcggagcctagcttccacccctaggatgcataccctatatagcataattcttctaacgaaacgttctacgaaaacggactggcggaacgggaaccaccgtaacccccccccctcacccccccccttctcctccggaaccggggggggcaaatttttaccaaatttgggcaaccatgatttccaatgggacggcgtttccgtgcgcatgcgcagtcggggcgaattttcggttgttagggcgttgccacgcggattatgggatgtggcctcgagtgcgcatgcgccggggatgtcgtataaaaagcctatatataaagaggggtgaaccaggggacccggtgcgcatgcgcgggccaggacccgcgggaggcgcgccctgcgcatgcgccggtaaaattccactgggcatgcatcgtgcgcatgcgccggtatttttccactagaggcggtcagtgcgcatgcgtcggtaaatttccactggatgcgcgtcgtgcgcatgcgccggtatttttccactgggcggccgcacctagggagcgcgagccccgtgccgggcatgggtcgcggcggtggaaaattaccgctccgcccacctaggcggggcctctgaaaacctataaaacccggcgtgcccgccgccccccggcgcagtccgcggcagggttccggccgtgctgcggtccgcacgctgcgcccgctcccgcctgcctcccgccctaccccccaccctccccggccgaggcccggcgccggtccgtccgcgggcccgtcccaccgccctggagcaccatccggggccgtgggccgggcaccgggcgcggcccgctccggacctcggccgggggtccctgccctccccccgctcgaccccccatccgacggcccggccgggctgggacccccgcaccggggtcccggttcccgtccgcggcccggggggacccgagcgggggcttcccacccccaccccgctcctccccgggctccggcccgggatccctcgctgctcccggcgacctccgccggcttcccggtccacccgccgcggaacggacgggacccggggtccgcgcccttcccctccccccacggggggctgggtcgcggaccccggttcctaggctcgttccgcggtgggcgaccggggatcccccacccagctccccttcccggcccgccccgctggcttttgggcccctccgggctttttttttccggctgggggtcgcggcggtcggccgacgacgacggtaggtgggccgggtggacggtggtggggacgggcgacgccccggctcgacggcagtcggtcccggaaggttgggggctgggggcccggtcaggagcttcgggagcggggtcgaccgcgacggcttccgggtctcgcggcggctccctctcggcggctccggttgggctcccctcccccctctcgagggtccggccgccagtcgtgaccgggggtccctcggcctagccgccggctctcggtccgccttatcctgggcgttggccggtcccgtgacgctcccctcccccactgctccccaaaaaaactccgcccgaaccgtcgcggcttgctggccctgggcgtggtcccccactcccctccccccatcggccgcccagccggggtcggcgcctcggaccccaccaggctgtggcgtgtgtgctggccgatgcggcggcgaggttgggtgtggccggaagcgctcggggtcgacggtgggccgccatgacacctcaattgccgtcagtacgcccctccacaatcaccgtccccacacgatgggcccggcaggtcacccaacgttggttcaggcccagtcgagtttttccccggcacgaacgcacgtccccgtgggctccacgcgttttccaccctttcctggaggggtccggaacaccgtgaatccacggggagggtcccggcacgggccgaggagaccacgaccgtcccacccggcgtgtcgactcgtccgagacccgggaagggaacaggccccacctttttttcccttctccgattttgccgtggaaaacccgtgaaccgatacgggtgcagacggccgaaaaaaatcgagacgacaatatgacggcagggcgcgatcttctcccccatccgacaaaaccgtgtcccttaaaattccccacctttctctgttcaaatgggcccgaaactgtaaaacaccgtttgaccgcaccccaaccggcgccatcttggtgactttctcgacggttctctcgctcgtcatgccgttctgagctccgacatggcggacgagagaaaatggcgtcgagagcctaggagcgttttcgctccaggcgggtaaaaaaatagcacgataacttttctgtgcttttttttgagacgttttagaagagcttttttctgctcagagcgaaaaaatgatagccctgaaaatctcgacgagtctggccgagcggcgccatcttggaggaggggcgagtcgcgggcaccgcctcggtaccccctggccgaggcgagtccgcggtcgccgcctgttccgtgatgctacctagagggcgctgtcgaggcgactcttcctgttttcgccctgagggctaacggtcgctgacgtcaaaccatctcgtgctcgctgagtcacatccggttgttgacaagcgatggaggaccgcacccaaagtgcgccctctagtcatcgcgcctgaccccttttataaactgctcgaagaaaagaacaccttatgtgaaaaaatacagaatgatgacaagttcatccaacacaaccgctcaacaacgccatatctatcagtgtccaaaaactatcttctatcctttgaaactataaatgctgcctatatacatatttagtatccaagactcttaccacgtagacgaaaagaagtgatacaatgatcttgacgtgtatcgtctatatcgtgctagatatattcagataagacgcgcaaaccatagatttctcatcagtatcatgaaagacctatagctctatatacgaacctagtcattttaggacagccgccggagaagccgacgagggatcgggcgggtgcagccagaacctcacgcccgatcccgcctccggtaggcgatttgcatctgtttggtaaaaagctcataagtctgtatgtgacctatatatatattatacgctatgtacaccgaactgtcgctgttgtataagaagaaaaaactctccatatttatatcgtctgaatttttgcttgatagacacgtgtttggaactctgtccccccacgttttcactgtgtataacaaaaatatgtgtttctcaaaagatcttgaggtgtttgaaaacgggggaaacctgcgtttgggtgcgctaagccccggactgggacgtagccggcgtccggcacctatatttttctatttttttacaaaatatatgatgaaccaagaataaaactctagctctcgtctatttttaatatgctctacttagaacctttttaatgacagaatgaactccatgttatacgctctttatatagtttctctgcactaacctttaaaaccgtatccttccctgttgtacaaatcatcttttgatacacaatgatgacctgatatccctccatatatatgatcggatattattccgttagacttgtcctccttttttttcctcatctcctatatctggagatatatgttgaccaccaccgccatgaccaccaaaaagctagccgtcacgactagaaatgtgtaggattcggactttccgttcgagaagaaagagaccgcgtctctggacgctctttttgtcggtctgaatcgacccgggatacgtaagagagcggccctacatcggggggcgctcgagaccgacgacgttccatctgaccagaaaaaaaggcacccctcggtagcgacctctcaccatcgtttgcccgtccgcccgtccttcgtagccatcatcatcatctcaggctctatcggtaccatcgttgtcatctgaaaaaaaaaactgcctcacccacctgcgtaaaaacaccatctttccggaggtgcggtaagacgggcaaatacggtcgtgccgaggcaaaaaaaaacgcaccatcgacaccacaccctcatgagcaccacctgtcggtgttggtcgtcctccatcgttctctacgaacatctcgacgcccgggtgacggacgacggcaagacgtcccggagaagacggtgttctctcgggcggtacgctctctggatctataatatctatagtagctaaacgagactgtgagtacgacgaaccacatcatcttttttttatgttgcttctttagaaaatgacttatgtcgacgacactcggcatcagccatctcgtgaaacacgctcgcttttcgtctctccaaggaacactgggtccgctgaaagggaccgtgtaccgaccaaagcaaaaaacacacacgtagtaacatgatcaaccacgtctgaatgacacgaaaacacaatcgtataacgctctattcatggaacgaacttggaataaaaaaaaccatcgcaggccagaggctaagccgaaaccgtccggggaagcgggcgcgagttttccgacttagcctttggtgctcgttgagcctctttttttttttctgattctctgaagaatcaccgtcacagccctatgacgcgaaatcaattgctagaacataaacgttctcaacaggtatgaaatgaacaaactagatgatgctataaccttatattgtgtgtatatagataggtgtgaaatttgtaggataaaaagtgtcgttgtatgatgcacaacgatcgtgaaactggagactgtagctctctaccgaatgcaaatacacaaatgacatcgattcccgtccccacataaagaaatgtgctttactgtgaaagaatgaagaagattcttgttcctcgtacgacggggccctcgctcgtcgtgcctcttcccccctccgggagaggggacgtcggggccctccgtcgcaccgggccgaagccagtgaaatgtttactacactgtcatcagaatatatgatgtatattatttcctccaaactcctcaccatagccaccaattcgcatcacttaagaaagtagtagcaaccgcggcggcggcgaccggccggtcgtcgtctcctcgtcctcaaatgttgtacatgtgcagaaaaatgtgtaaatacgtgttatttatcccatgcgtcttgtacatagatatatgtttttatatacgctatttatactttatatatccttttgcataaccatagacagtcaaggattttaatgatttgctcatccgcctttgagccatcgcttaggagttagttcctctatgttctcggcccaccttttcgactacagtagcaaacccttgtactaccaccccgataaaaaccacatcatcatcgtcaccacgacctggaaacgacacacgttcccccccaatcttgggcatgtgtatatatatataaagaatgggagggagaggacgtggggctcgagaagaaataaacgccaagctcgattcgaaccaaaaaaccacatgtgtattgtgctttgttttttttttttacggtggggaaaaggagggggccgtcattaacggaaaccgtgtatggggtccggacacgaacagtacacagcttatggggaaaaaagctcacagagagaaaaaaaaacaccaagctcaggcacgcgtacatcattatcatcatcggatatctcaccacgagtcatagtagtaccaaggagtgtgtaacaccattttttcttttttctttgtaacgggataagggacagcaatcatcacgcacaacacccttcactctctttttagtcatccatatcatcgctgtaacacagcatgtcctcgtaatcgggcgtctggcagcgcattaccaccgagtcgtcttcttgcggtaccggtggtggcggcggcggctgctgctgttgggttgccgtcgtactgtgattaccgttggcggactgcaccgggatgatgggctgcttgtggggaacctggggtggactgccgccgtgagaaggcgacggcgtcatcaagttaagctcaccacggtgactccggacaccggcgaggggcgccgggggactgggagggaccgcggtcgtcttgtagacgacggtgtccccgtgtcgatccgtggctcgtaccagatcttgactgctagcgtcgtcactgtcttcgtcctcttccagctcgccctcagagtagtgctgctgtggttgcgacggtggctgggcgggaggagcggcggcggcgatcattggagagggatgtcgatgactcccttctctgtcctttttatcgtaggctgtcagcgttgctgggtccgtcctgctttccatacttgcgcattgctcatcggtgggatgaatttggtctcctccccgctgttgtccgccggcagtggcgtggttgctggcggttgtcgttgtcgtaccggcaaagacggtgagatccaatagcgactgctcgtcgaagggacagtacgctatcatgaaacgatagggtgccaacgcgcgttggatgcgcagttcgcacatctcgttctgacactcgtggcactgcagggcgcctaggatcaggtccgagacagcgccgcagcggtaggtacccatggcgttgttagtatcgaactggtcaaaaaattggggcgtaccggtgacttgcaacgcgcgacggcgtagcgagacggccacgcgcgagaaggagcacacgtaggccatggcgcggtgcatgggttgcgagaaggtctcgggcggacgcttctgcagatcgcagacgtcgtcgcgtagccaggcgctcatttgaccgggcttcttgactagccgtttgagcgtgctgcaatggtcgccccagccgtcctggtggtccaggatgcagcccaggtccaggttgttgagtttgttgaaaagcagctgacgcatgccgcccaccgtctccagatagggatcgtgcgggttgacgggtagcccgtgcaggtggtggtacttcatgtagctgagcgtttcgtcgatgatggccagcaacgtgtgcaagttgggagcgttgtatacggcgaagatcttttccaccaccagcttgcgcagcaacggttcctccagccaatcgaactgttgacggatgtgcaacaggtagtcggtgtgcatgagctcgtcgtgtgacagcaggatgcgaccgcgcggctgatgatcttgcgggaaggcggtggggaccttgaggtcggcggggtagggtgccagacgtagactctcggccgtgtagcgctgaaggtcgtagacgggcgaggtagaactcggtgaggtacccgacgaggcggcgccgcgctgcagacgcgctctttttttcttttcgatcaaacggctgagttgctgtagttcgtcctcgtccatggcgtccagttcgtcgtcaataagcgccagcatctgttgttgttgcggtccggcggacgatccgtgatgattattggctgaggaggggtgagaagaaccgaaagtcgtaggacaactgggaactcggcgacgaagatgcgtcgaatcgccgccgtgatggtgcggttcgccgtcatcgttgtcgtaagacttaccgtagtgggggttaaggggcaccgaggcggacgcggccacgcgtcgcttgaaagaggaggacgccctatgtccgccacggaagcccgcagtgcccatgatgatgtgtccgccggtgcccccgagtgcgtggcgggaggagggtggaaggggaggaggatagtggtccggatcgccttcggtatcatcgtctttgctgtagcggggtcgtcgtgcggggacgcagggtcggtgatgatgcgaggcggcgccgacggtatcttccgcgagatggtattcgctggcggctgctccgttccgtgtcgacggcgaggttggacttcgctcgcgtcggaacttccgtggcacgggttcgtaatccagacagaagcgccgtgcgcgacgggcgcggcgttcgcgctcgctcagggaagataacgacggagcgtcgtgacggccgcgtgagtgcagctccatggccgccgtcgctaggaaggtcacgttctggcacgctgatgtatatatagatgagaccgctgccggggggcgggtcaccggcgccgtggaaagtgaggctcagacggcggtcgccggcggcatgggcgcgtcgggcggtctgattttgatggaaatgtggacgtttttggcgttggagtgacactttttggtgaaacagcggctccagaggctggcccagagcgcgtagctgtgctcggtgcgcaggtcgatgaacacctgcacggtctcttgcgggttgcggtgcgtgtagttgagacagcgaaaatcccgcgtgcgcgcgccgtcgcgtcgcttgacggccacgcagcaggcgccgtggggctgaaagaggaggacgtggggcgcggtaaactgctcgctgacgtgcggttcgtagtgttgcgtgaggtgctcgagcagcggcggccacacgcgggtgacgacgagccgctgcaagtccgtgtcggaaatcgcagcggcagtggcgccgtcgccaccgtacaggtgataggcgagcacctcggtgagaccgcggcgtcgataacgcgtcacgttaagcgagcgcgtctcgataaagttggcttcggtcgaggggcagattttgtcgcgtacgctgagaatgacgcgtggcggcggtgacaggggcaacgcgggcaggtcgtgcggcgggtggtggtgaagcaggttacgcagatccagttgggcgcgcacaaagcctagcgggtgttcgcggtaggcgtcgggcacgatgaacagcggcaacagacggcgatgcatgaaatagccgtcgtcttggtccattttatacatgtagggcagacgtacagagcgtccatggtggtagatgcctgtgtctaggctgctctcgggatgcgagatggggtccagcagcgtgtgcagttcggcgtcgagacagacggcgtgattgagcacctgcgccacggcgcgtaaaacgctggggtgtacggctatggtacaggcggggaacggcgtgatgatgcgcagccccagtttgcccttgcagcggcagtaagggggtgacgtgtcaacagaggacgttgttttttggaaaacgccgttacccgggacgttatttttatcctctttcccgtcttcgtcttcctctgtgtcgcgctcgtcccggtaatcgagatagtcgtcgtcatcgaaaggcgcgccggccgcgtccacgggcacgctgttgggtgggcacgcgcttttgaagaaatagaccgggtgccggtcggggtgcgtgtagccaaagaggctcgcccatacggtcatccagacgcgtcgtagtccgcgacataactcaaagacggtgtgtcgcgccagaccggagacgccgtcgcgcagccgtaaatcaaagtcggccacaaaattgaagacgggcagacgttcgttgaagacttcgtgtcgcgtgtagtagaactgtgtctcggggctggtgctggccacgtcgtcgtcgtgtagccacacggtctcggtcagggcctcgtccgagaaacggctgtcgggtacgtgacggagcaggtcgcgcggaaagaggctgcgatgccaggtttcggaggccacggcgcagaagacgtgctggtcattgggcaggtgtacgcggtagacgggcagcggtcgctccagcagcggtgccagcgcgggctcgggtagcaggtagcgacgttgcgagtaacgcgttagcgtgccggtggtgtaggtctgagctgtgcgcagcgaggcgcatagacgtaacaagccggacagggagcgttccagcggcgagaagacagactcggaaagcgtgttgatgcgttcgagctggcgcgccagctgcgtggaggtgccgaagaagcccgccaggtgcgtgccgtcgatgcggccgccgtagccggccagccccaggccgtgcgggctggtcgccgagtggggggattcgtcgagacgtagtagatgcgtctccacgtaatcgtgtagaaagttgtcgagcgagaagtatttttgcatgacgtccagcagctcggtggaaagccggcggcccagaaaacccggttcgcgcgtacactgcgcttcgggcgccgcgtcagcgtcgtaagccaccacgcgccggtactcgagcaaccgcgcgcgtgccagcgccgtgcggtaggccaggtagacgtagtgcacgcagaccgtgtcgggcagacgcgcacgttcgcggaacgcgttgatctgcgtgtccacctgctctagctcggtgtagtcgcggcggttgcgcgccacggcgtacgccacgaaagcggacacgcgctgacggaagggcgagcccagtagcagacgcgcgaactcgcccatggaggcgtgcgtggggatgatggtgcccaggtcgcgcgtgcagaagctgcgcacgtactcctccacggtggagatggtgctgtactggccctcgaataggtagtaggccatggtcagtagcacctggccctcggtgtgcccgaagacgctgatgaaccacgagggcgaggtggggcagaggaagacctggttgagatgacgtagcacggccgcgtggtgaaagtacaccaggtgcttgaattcgcgcacctcgccgccgtgttcgggcgagagcacgggcgtgcggaagagatgccggtagagcggccgcgtctcggcctcgtccagactggcgatgagcgccgagagggggatgggctggcgcgcggccaggtagcgcgagagttgcagcgtttcgttgttcacggcgaagacgggcgccacccgccgcgagtccgagcacttttgcgtctgtaggcagaaataaacacgtcgcgagacctggtgtttgaccagcagggggaagacgcagtggtccgtcggtgtctgcgagagtacgttggcgactatatgagcagaatcatactctgttgcgaacagaacgagcgtcatcgtcgcgccggcacgatgcagctggcccagcgcctgtgcgagctgctgatgtgccgtcgcaaagccgcgcctgtggccgattacgtgctgctgcagcctagcgaggacgtggagctgcgcgagctgcaggcgtttctggacgagaactttaagcagctggagatcaccccggccgacctgcgaaccttttctcgcgacacggacgtggtgaaccacctgctgaagctgctgccgctctataggcaatgccagagcaagtgcgcgttcctcaagggctatctctcggagggctgtttgcctcacacgcggccggcggccgaggtggagtgcaagaaatcgcagcgtatcctagaggccctggacattctcatcctcaaactggtggtgggcgagtttgccatgtccgaggccgacagtctggagatgttgctggacaagttctccacggatcaggcctcgctggtggaggtgcagcgcgttatgggcctggtggacatggactgtgagaaaagcgcgtacatgctcgaggccggcgcggctgcgacggttgcaccaccgacgccaccggcggtcgttcagggggaaagcggcgtccgcgaggacggggaaacggtcgccgccgtgtcggcctttgcctgttcctcggtttcggactcgctgatccccgaggaaacgggggtcacgcgtcctatgatgagtttggctcacattaacaccgtctcctgtcccaccgttatgaggttcgaccagcggctgctggaagagggcgacgaggaggatgaagtgaccgtgatgtcgccgtcacccgagcccgtgcaacagcagccgccggtcgagcccgtgcagcagcagccccagggacgcgggtctcaccgtcggcgctacaaggagtcggcgccgcaggagacgctgcctacgaatcacgaacgcgagattttggatctcatgcgacacagccccgacgtgcctcgggaggcggtgatgtcaccgaccatggtcaccatacctcctccccagataccctttgtgggttccgcgcgtgaactcaggggcgtgaagaaaaagaaacccacggcggcggccttgctgtcctccgcgtgaacagcctggcacgttttggaaaacgtacgtgatcacgaacacgacgagtacgaggtttctcatagacgtactttattaggtcagggatgacggggaggtttcggaccgacgtcaaaaataacgtcactcgtgttgacagggctttctgcgtcggagctcttttcatcttcttctgtctcgtcgacgtcatcgtctaccggcgagggtgtccgttgcagcaacgcgtgctcgggtgtgtgggtgaaaccgatgtcgggggtgggcggcacgatcatctgtcctagggggtgactgcccaccggcagataggtaaagcggtgggtggtaaaaaccgctttggctacggtggtgtgtggggagatgcagacggtggtgtgcgaagtgttgaccaccgtcacgccggccgcggtacccgggagccagatggtgggtcggatgatgagatccgattgactaaactggcgcacgcccactatgagggcgcagataccgggcgcgtgcacgtaggccgcgtcaaaatagacggtttgcgtgtgacccggaccgatcaccagcgtctgacgggtacgtaatgaaaagaaacggtgttcgttgggcggcggcaagttcatgagctgccagggttctggcacaaaacaggggaaaacgccgatatcgccttcgatggtgcccggaaagatggactgaaaagtgtcgttgaggttgacgacatccaactgcgggacttgcagcccggattccagcagctcgggcatgcaaacgaattgcgcgtccaggcatttgtaaaaggtaatgccgaaaaaaccttcggggatatagaggctgacgcccagcgaggtgggcactttgcgctcgcgtgatagccaaatgatgtgtttattgtaaaaggccagctgcgtgtggcattgtttgacgatgaaactggaaggcatccacttgtagggaactttgagcggcgacggtaatggcgacgacgcttcatcctctcccggatgctgctctttgtcgtatttctcctcggtcgattggggcagcgtaaatgtggtttgaaaatcgctatcgctagcgaaacgcacgcagtaacgcatattgacggatttctcggctaggatgatggagcctgatgacggtgcggactcttccttcattattaacgtaggggtctcccagaatcgctgaaaacgggagcgcggcagccgcgacagtaccagttgagagtcgattcggtcggttaacatcgtaagcatcgtggcggtggtgtgatggagtggaacacactagtattaggtcttttggttttatcggtagtggcaagttccaacaatacgtcgactgctagcacaccgcgtccctctagttctactcacgcctcaacaaccgtgaaggcaacgactgttgcgacaactagtacaactacggcgacaagtacttcatcgacgactagtgccaaacctggttccactactcacgaccccaacgtgatgagaccacatgctcacaatgatttttacaatgcgcattgtacatcgcatatgtatgagctttcactgtccagctttgcagcctggtggactatgcttaacgctctcattctgatgggagctttttgtatcgtattacgacattgctgcttccagaactttactgcgaccaccaccaaaggctattgagggtggatagatttgcagcccggcggtgttccggcggggtaagatttccatacgcgggtaactggaggctaaagttacggattttatctagaaacagcagcgagtctagatagtcccataggggatctatgaacgttctctgaaacctcgtcgatggtgacgtaggtgtagtttcgttattatcggaagccgtttcgttttccacggacatggtttcgttgtaatataaggagctcatgtcaagagtgccataaatagtgtacggcgtttcgttacgaatcagtacgtgcgtgtttttcataaattctgacacggcggtacggttacggtctggtttacaaaagggttcattccgataccgcagagtagtatatacccatgttgcgagatctcttaactgcgtggccataatggatttcataaagttactatcaggacgataacctgtcgtagatgtggcaacccgcgttacagcagcggtagcactataagtcacgttagtggtgacgttgaaagcggtagacgttgtataggaaagatatggcgtagtagtactttgagatttcttattctttttttgtggttgttctttgacaagcgcttgtttacgtttgagttttcgcatagtgtttttcaacttggtgccgttaatatacttgggaacgcggaataaatttcggctcatggcgttaaccaggtagaaactgcgagtgcagttacgttgcgcgtatcgtaaaagtagggcggttaggcccaaaaagtagattgtctgactatccacgttgactttgttggaacctatgtacagttttgtgttccaacgtggtacgttgaaaaacataggattaaacgtggtgaaattaccgcaacctttttcgccggtatcattgcgtttggaaacatttaacatttcggataggcagttcatagaaggcactgtgccgcaaggtgggggtcgtaacgttattttgtgggccgtgtgattatattcggaatatacgtacttggctggttttcggagttgagtactgtaaaagtcaaaccacatatgggtaatgctatcatttctaatgggacccgctaaaatgtagtcttgaggaaatttatccatgctaataacgatggcatgaaatttttgctgactggggtacattaaaaaccggtatccgtcagatgatgtagacatcaatcgttttaagatatcttccttctgtttcttcagaatctctttacctcgataagatagcacggtatacggccaggaacgtcttgttcctctggagtttaccaatacattacaatttatgagggaaaggagcaagaacgttatagagatcaggagcataattttaggaatgcctttcaccattatcatctcttttttccccattacagaggaggagaccccgcaccgtccgtctgccttgtggtttggtttgcctgcgtgtactcactgctgattctggtcgttttgctgctcatctaccgttgttgcatcggcttccaagacgacctagtctcccgcaccttggctgtgtaccgagcttgtatacagggcccgatatgtaaccaaacccacaacagtacctcgtaaataaagacgcacaaacctcacgcatatagtatcatcacaccgtgtggcgtgtactttattacaatgagcaagagtgcccctaagtattggggcccgtaccgttttagaaggttttgtgcgaatgtctttaacttctctgtcccttttttcataaactgtcaggtcctacaatcagcatgtcttgagcatgcggtagagcagatagatgccgatgatggccgatagcgcgtagacggacatcatgaggagacgactgtcggtggcgtccacgacgacgtcagttacttctagtaccgtaccgtttttcaaaagcatgaggtagtgagttcgcggagatgagaccaccacttcgttgtagggatccagggcgaaaaggacgtcgtccgagtcgtgcatgtacatgatgttgatgacgccttgcgtgtcgtcgtattctagcagggcgctttggcaaaaggcgcagttttctagcgaaatgttgagcgccactgtgatgctgtgtgtggtatgcatgttgcgcgtcagttcgcatttagtttgactgtccgtctgggtgatgatgaggctctggcctacgacggtggtggagacagggtaggagatacctttgatcaggtactggtttgttacgatataactgacgtgttcggagacggtcagcgcggagaaggattcgccgagcggcaagcaaaacaggtcggggaaggtttccagcgtgcttggttgcatggtagataggatggagagggcggcgggaacggtagcggggacggtggcatcggggaagagacgcgtgaggcgttcgagcgagtgatcgcgtcgcccgctactggaacagggtgtgtacaggtcgctgaggtattcgtggtgtggatgagctaacaactgcgtaaagtgtgatagctcggccaatgaacagaggcccgtttctacgatgaagatttcgcgtctctccgtcgtatgtaccagcatggagtggacgaggctgcccatgaggtagagttcttggcgtgcgaaggctgaaagaaaagaggccaggtgcgttttgtgtagttttagggcaaagtcggcgatctgtcgtagtgcccattgggggatgagatgttgctgattctgtttagagagtatgtagaccaggcgtacgaggctggtgatgtcggtgatctgattcggtgtccaaagggctcgtttggccaggtccacggccgtgggatacagcagcaacgtggtgcgtggtggtgtttgtgagaggcaggtgatcataaattcttgtatttgtaagagtgcggcctggcggtctagggcccgtgggacggagacttgggcgccggcctcttcttgtcgggctgctgcgaacagtgctaatgcgtaggcgaaggccatttctaccgtgcggcggtccagcatctgacatcgaccgctcttgagtacatccacggcgtaacggtgaaagctgttacgtagtagtgcgctgaggtctaggtagttgaagtcaagtgcggcgtcaagaaagtccgggtctttgagataagagtgacggttcagttgatctttcttaactagcaccaggagctcgtgtttttcagtttgtcgtagtataaagttgtcgcgttgatagggcgctttgaaaagtacgcgtggaagatggccgaagataagcagcatgggtgtgtcgtcgtctatggacaccgtaactacgaagaagtcctcggtcagtgttattttaacgtaacgtagttcgtcgatgaggtaaaagccttggtgcaaacaaggtgtgacggtgctgaatagtagatcgtgtccatcaaagaggatacaggtctggttaaagtgtggtcggtgtagtcctgaggtggtatgtgattctgtccagccgtgtggagtggtttgcggtggcatccaaacgtgaggtattgacaggtcaatgggcggtggcacagtggtgggctgttcacctaggctgtcttgtgcctttagctgctgcgaaaaagatcggtagctggccaggtctttggataccagcgcgtaagtgttaagtctctgttggtatctttccagggtttcggtcagatctacctggttcagaaactgctccgccagaggacccgcaaaaagacatcgaggcatatggaatacatagtattgattatagctttggaaaaagttgaaactgatggcgttttccctgacgaccgtgctgttacggaggctgctgttgtaggtacactgggtggtattttcacgcaggaagcggatgggtctcccgtaggtgttgagcagtaggtgaaacgctttgtccagcggttcggatacggcttctgcgccatatcgtgacgaaagtaggtggctgaagagacagacggcgaggatgatgaggtaggaggggaggcctggccgcatagcgcggccgcgccgctgggttcagcggcgtgatccaggtggtggttggcgttacacccgagagaaggagagaaaggatcccaggaaggagcacccgggtgtggcgctacgggttacaaaagtcgcgtctccgtctatttaatacgatgtcattggccgctgcgaagggagaagaggggacacgcgagtaagccatgccgtccgggtgtggggacgacgctgattcgacggggaacgctctgcggagattgcctcacgtgcgtaagcggatcggtaagcgcaagcacctggacatctaccgtcgcctgctgcgggtctttccctcgtttgtggcgctcaaccgcctgttgggaggccttttcccacccgagttgcaaaagtaccgtcgccgtcttttcatcgaagtacgattaagtcggcggattcccgactgcgtgttggtgtttttaccgccggactctgggtcacgcggcatcgtgtattgctacgtgattgagttcaaaaccacgtactcagacgccgacgatcagtccgtgcggtggcacgccacccacagcctgcagtacgccgagggcctgcgccagctcaagggcgccctggtggactttgattttctgcgtctgccgcgcggtggcggtcaagtctggagcgtagtgcctagtttggttttttttcagcaaaaggccgatcgcccatctttttaccgggcttttcgctcgggccgtttcgacttgtgtaccgattctgttctggactatctgggacggcgtcaggatgagtctgttgcacaccttttggcggctacccgtcgccgtcttcttcgagccgcacgaggaaaacgtgctgcgctgccccgagcgcgtgcttcggcggttgctggaggacgcggcggtggcaatgcgcggcgggggctggcgcgaggacgtgctcatggaccgggtgcgcaaacggtatctgcgtcaggagctgagggatctgggtcacagggtacagacttactgcgaggatctcgaagggcgcgtgtccgaggcggaggcgctgttgaaccagcagtgcgagctcgacgaaggaccgtcgccgcggacgctgctacaaccaccgtgtcgtccgcgttcgtcgtccccagggaccggcgtggcaggagcttccgccgtcccacacggtctttatagtcggcacgatgccatcacgggacccgtcgccgccccgtctgacgcggtcgccgcgtcagcggccgccggtgcttcttctacctggctggcgcagtgcgccgagcagccgttgcccgggaacgtacctaactactttggaatcacgcagaacgatccctttatccgctttcacaccgattttcgcggcgaggtggtcaacaccatgttcgagaacgcctccacttggactttctcctttggtatctggtactatcggctcaagcgggggttgtacacgcaaccacggtggaaacgagtgtaccatctggcgcagatggacaacttttccatttcgcaggagctgctgctcggcgtggtcaacgctttggaaaacgtgacggtgtatccgacgtacgactgtgtactctccgatttggaagccgccgcctgtctgctagtcgcctacggacacgcgctttgggagggccgcgatccgccggactccgtgacggcggtgttgagtgagctgcctcagctgttaccgcgtctggccgacgacgtgagtcgtgagattgccgcttgggaaggccccgtcgccgcgggtaacaactattacgcgtatcgcgactcgcccgatctacgctactacatgcccctaagcggtggtcgccactatcacccgggcacttttgatcgtcacgtgctggtgcggcttttccacaaacgcggcgttcttcagcatttgccgggctacgggacgataacggaggagctggtgcaagagcgtctgtcgggccaggtgcgcgacgacgtgctttctctctggagtcgacgtctgctggtcggcaagctgggtcgcgacgtgcccgtctttgtgcacgaacagcaatatctgcgttcgggcctgacctgcctggctggcctgctgttgttgtggaaggtgaccaacgcggatagcgtcttcgctccgcgcacgggcaaatttacgttggccgacctgctgggttcggatgccgtagccggcggcgggttgcccggggggcgcgcgggcggcgaagagaagggctacgggggacggcacgggcgggtacgtaactttgagtttctggtacagtactacatcgggccgtggtacgcgcgcgaccccgcggtcacgctgtcgcagctctttcccggcctggctctgttggccgtgaccgagagcgtgcgcagcggctgggatccctcacgtcgcgaggacagcgccggaggtggcgacggcggcggcgccgtgctcatgcagctcagcaagagcaaccccgtggccgactacatgttcgcgcagagctccaaacagtacggcgatttacgtcgcttagaggtacacgatgccctgctctttcactacgaacacgggctagggcggctgttgtcagtgaccctgccgcgtcaccgtgtgtccactctgggctcgtccctctttaacgtcaacgatatttacgaactgttgtactttttagtgttggggtttcttccgagcgtggcggtgttgtaatttccaccacgtgtcgctcgctgcataaagggcgaacgtcctcggagagggtatattcgttcggcgagagcgggcggcggtggtgggtatgtccccttctgtggaggagactacctcagtcaccgagtccatcatgttcgctatcgtgagtttcaaacacatgggcccgttcgaaggctactctatgtcggccgatcgcgccgcctcggatctactcatcggcatgttcggctccgttagcctggtcaacctgctgactatcatcggttgcctctgggtgttgcgtgttacgcggccgcccgtgtccgtgatgatttttacttggaatctggtacttagtcagtttttttccatcctggccaccatgttgtccaagggtatcatgctgcgtggcgctctaaatctcagcctctgtcgcttagtgctctttgtcgacgacgtgggcctatattcgacggcgttgtttttcctctttctgatactggatcgtctgtcggccatatcttacggccgtgatctctggcatcatgagacgcgcgaaaacgccggcgtggcgctctacgcggtcgcctttgcctgggttctttccatcgtagccgctgtgcccaccgccgctacgggttcactggactaccgttggctaggctgtcagatccctatacagtatgccgcggtggacctcaccatcaagatgtggtttttgctgggggcgcccatgatcgccgtactggctaacgtggtagagttggcctacagcgatcggcgcgaccacgtctggtcctacgtgggtcgtgtctgcaccttctacgtgacgtgtctcatgctgtttgtgccctactactgcttcagagtcctacgcggtgtactgcagcccgctagcgcggccggcaccggtttcggcattatggattacgtggaattggctacgcgtacccttctcaccatgcgtcttggcattctgccgctctttatcattgcgttcttctcccgcgagcccaccaaggatctggatgactcctttgattatctggtcgagagatgtcagcaaagctgccacggtcatttcgtacgtcggttggtgcaggcgttgaagcgggctatgtatagcgtggagctggccgtgtgttacttttctacgtccgtccgagacgtcgccgaggcggtgaaaaagtcctccagccgttgttacgccgacgcgacgtcggcggccgttgtggtaacgacaaccacgtcggagaaagccacgttggtggagcacgcggaaggcatggcttccgaaatgtgtcctgggactacgatcgatgtttcggccgaaagttcctccgtcctctgcaccgacggcgaaaacaccgtcgcgtcggacgcgacggtgacggcattatgagcggcggcgctgtacggcagcggggagaaaagtggcagataaatcacgtcaggttcacacgtcgttagccagcgtcggcatatgaagggcgcgggcggccagtacggcctctgggctgagacaggacgaggcagggtgagaaagaggaggatgggggggaccggggtggtggtgctgctgctgttgtgggtgcggacggtgcgggtgccgggacagcgtgccggcgaacgttctgtaatcttccataataaaagtaaaaatgcccgtctcgtgtcgactccgctggatgtcgaaggcgtcgggggtaatgcgcatcttgccggtgccgatgagataaaagtaccacattttttgacagatgatgcgaatcaagggttcgtacgcttcggcaccccagtggcgcgtgaagaaggccgccagacgaaacaagcggtgtccgtagagcgtgcctagggagaagaggatgttgccgttgcgcgccaggtcttcggggaaaacgaccggcaggccggtgtggcgctgcacaaagcgcgtcagcagtccgccgctcaagcgcgggtgacataggcgctggctgagacgggcggcgcgcgtttcatcgaacacggccgcctcaaagtccagccccgggaaggcctggcgcagttcgcggtacagatgaggccagtagggttgcggcgtcttgcgactaagcacggcgtggtccgagacacccaggttgttcatggtttcgcgcagtagcagcgtttcgagaccgcggtgaaagaggaggacgcagatgaggcgtacgatcttgagttcttccaaacgcagcgagctcagcggctgtccgcgcgacatcttctcgctaatctgtaatattagatgattggcgcaagtaaaggagaatttgcccgtgcggacccgcgggacggcggggttctcttcgtcgcgggccatcatcgttcgctcggtgagcgggtagcgacggtgacgacaatgacgatggacgagcagcagtcgcaggctgtggcgccggtctacgtgggcggctttctcgcccgctacgaccagtctccggacgaggccgaattgctgttgccgcgggacgtagtggagcactggttgcacgcgcagggccagggacagccttcgttgtcggtcgcgctcccgctcaacatcaaccacgacgacacggccgttgtaggacacgttgcggcgatgcagagcgtccgcgacggtcttttttgcctgggctgcgtcacttcgcccaggtttctggagattgtacgccgcgcttcggaaaagtccgagctggtttcgcgcgggcccgtcagtccgctgcagccagacaaggtggtggagtttctcagcggcagctacgccggcctctcgctctccagccggcgctgcgacgacgtggaggccgcgacgtcgctttcgggctcggaaaccacgccgttcaaacacgtggctttgtgcagcgtgggtcggcgtcgcggtacgttggccgtgtacgggcgcgatcccgagtgggtcacacagcggtttccagacctcacggcggccgaccgtgacgggctacgtgcacagtggcagcgctgcggcagcactgctgtcgacgcgtcgggcgatccctttcgctcagacagctacggcctgttgggcaacagcgtggacgcgctctacatccgtgagcgactgcccaagctgcgctacgacaagcaactagtcggcgtgacggagcgcgagtcgtacgtcaaggcgagcgtttcgcctgaggcggcgtgcgttattaaagcggcgtccgccgagcgttcgggcgacagccgcagtcaggccgccacgccggcggctggggcgcgcgttccctcttcgtccccgtcgcctccagtcgaaccgccatctcctgtacagccgcctgcgcttccagcgtcgccgtccgttcttcccgcggaatcaccgccgtcgctttctccctcggagccggcagaggcggcgtccatgtcgcaccctctgagtgctgcggttcccgccgctacggctcctccaggtgctaccgtggcaggtgcgtcgccggctgtgtcgtctctagcgtggcctcacgacggagtttatttacccaaagacgcttttttctcgctacttggggccagtcgctcggcagcgcccgtcatgtatcccggcgccgtagcggcccctccttctgcttcgccagcaccgctgcctttgccgtcttatcccgcgtcctacggcgcccccgtcgtgggttacgaccagttggcggcacgtcactttgcggactacgtggatccccattatcccgggtggggtcggcgttacgagcccgcgccgtctttgcatccgtcttatcccgtgccgccgccaccatcaccggcctattaccgtcggcgcgactctccgggcggtatggatgaaccaccgtccggatgggagcgttacgacggtggtcaccgtggtcagtcgcagaagcagcaccgtcacgggggcagcggcggacacaacaaacgccgtaaggaaaccgcggcggcgtcgtcgtcgtcctcggacgaagacttgagtttcccaggcgaggccgagcacggccgggcacgaaagcgtctaaaaagtcacgtcaatagcgacggtggaagtggcgggcacgcgggttccaatcagcagcagcaacaacgttacgatgaactgcgggatgccattcacgagctgaaacgcgatctgtttgccgcgcggcagagttctacgttactttcggcggctctcccctctgcggcctcttcctccccaactactactaccgtgtgtactcccaccagcgagctgacgagtggcggaggagaaacacccacggcacttctatccggaggtgccaaggtagctgagcgcgctcaggccggcgtggtgaacgccagttgccgcctcgctaccgcgtcgggttctgaggcggcaacggccgggccctcgacggcaggttcttcttcctgcccggctagtgtcgtgttagccgccgctgctgcccaagccgccgcagcttcccagagcccgcccaaagacatggtagatctgaatcggcggatttttgtggctgcgctcaataagctcgagtaagagagacgctatatttagggcttccctctcttttttttctacaccgtgataccctaataaagcacaccgcggttattatcaacgtctctgtgtttttattatttagaaataaatacagggaatgggaaaaacacgcgggggaaaaacaaagaagtctctctctagatgcggggtcgactgcgtggggtgctggaagtggaagcggtgctgatgggtgagggtcgtggcgcgggcacggaccgcaacgtgctgctgatgtctgccgcggtacgcacgtcgccgtccatgtcgctgcgcagataagaggtaggtcgtagtgcggcgtgctgcacgctcaccgttaatggtaccaagtcgtcaaggctcgcaaagacgtgccacgaggggatgacgagcgtgagagccccgttgttaccgcttcgacgtctttgtccggtcaggatcagtgcccgggacagtccggcttgggtgtccgagtcctcgtcgccgctggcttcctcgaagccggcaaacatggcttcggacaggggggtcggcgtcggtgtggaggagaggtcatcttcgtcgtcctcttcctcttcttcctcctcttcctcggtgggtggtaatccgggggactgcgggagaaactcggagacggcgccgcgcatgacgttgctccgtggaaagagaccggcgcgcagctgcacctggggacgcttgattttgtccggtttaccgggtgtgagagtccaaaacccacggcggaaaaagtggatgcggcctagcggctgtcggtgttccaaatgaacggcctgatcgccggtcagcgtgacgcggagggtgattcgcacacgatcgggtagcgggccggcttctatggagacgcccgggatgttttccgggaaaaagatggtgtcgtgagtctgattggtctcgaaagcattctggatctgcacgatgtactcgggatgtatgcgcgtcagcgtaaaacttttgggaatcaacagctggaagccgttgtccggcaagcgtcgtaggtgcgggtacggattgtgtcgcgccaccacctcggcgcgatgcgtgtaaaccgaaaagtgcagaaacacgctggtcggcgggtgcggtgagtcgtgatgcagaaacagcatgatccattggcctcgttcgtccgtctccgttttgtggatgtacgtgttagggtccgaacaggccagctgctccagggcgtctaccagcgtcagcgggatggcgccggcgcgaaaggcgaactggctgacaaagatctgccctgcctccaaactgctgtcggttctgcggcgccagttcggcgttacggtcagtcgcacggcccagtggtgagccgtgcggcggatgatggcgcgcgcttccattcgcggccgattttcttcgccgccgcgccgctggctctgaaagaggtgcagtccgctaacgggcacgcggtccagcggcagcgcaaaggccagtaccgagaccgtgttgttttctgagcctggcgtcaggcgtcgtgggccaaagttgttgaggtccaccagcagtcggtcctgttcgcccaccacgcagcggcccttgatgtttaagtcggtcaggtctacggtgtcgtgcggagatttgttctcctgaaaacagcagagaaccgagggccggctcacctctatgttggtacgcaggtccaggagtcgcagacgaccggcttccagcgagccgccttccacgttggtgatgagccgaagcacctggcagtgcaggcgaccaaagcttccgctggcggcttcggcctcgctgatcgcggccgcttccgacgagggtccctcaccgggcgaggacgatgcctgagacattgcgaaggcgggatggggggagggtcaggggatgcgcaaaggtgaacgggtcttcgtgggaggtcgggaagggttccggcaactgtcgcaaatatagcagcggtgacaggtgtggcggccaaaagttgcgtgtctgagtggacgtgggtttttatagagtcgtcctaagcgcgtgcgcggcgggtggctcaacctcggtgctttttgggcgtcgaggcgatgcatggcccgggcaaggcgtcttgccggtggcggcgacgtttgggttgcgcagcgggctgccatacgccttccaattcggcgaagatgcggtagatgtcgttggcgtcccagaagaactcctggtacttcagattctgaccctgaaccgtagccaccatgggcaccaggttgcgggccaggatgccggcctgccagggcggccaggtgaacacggccggattgtggatttcgttgtcggaatcctcgtcggtgtcctcttcgggcgcgacggtggactcggccttaaggcggccgcgtgtcataacgcccgccgtgcacgccgtcgccgaggatgctgatttgcgtttgcggcccgcggaagtggaggcgctcgccatggcgccgccgccggtgacgcggggcgtcttacgctcggtggttacgagttcttcgtcggagtccgatccgctggtccagacgtcgtcgtcgccctgggcggcaccctcgtcgtgccggtcccaggtgtgtcggtactcaagcttgccctggatgcgatactggctggtgaaggtggggtgctcgctgtactgaggcccgcgctgcagcaacaagtcgatatcgaaaaagaagagcgcagccacgggatcgtactgacgcagttccacggtctcgcgtatcgcttgtacctccaggaagatttgctgcccgttcatcaacaggttacctgagatgctcaggcccgggatgctcttgggacacagcagcccaaaatgctcgtgtgaggtaaaagccacatccagcatgatgtgcgagatcttgcccggtttgattatcatatttttgggacacaacaccgtaaagccgttgcgctcgtgggggcgcatgaagggttgcgggttgcgggtcatcgttaggtcctcttccacgtcagagcccagcgtgacgtgcataaagagcttgccggagggcacgtcctcgcagaaggactccaggtacaccttgacgtactggtcacctatcacctgcatcttggttgcgcgcgtgttctccatggagcaaaccagctcgtgcgcgcacaccacgtgccgcagtgccacgtccttggtgggaaacacgaacgctgacgtgtagtagacgtcgggctctttccactggttctgctgacgcgtccaggccagtcccgagaccgtgagacgcgcctgccacatctgcttgcccgacgcgtgaataacagcgtcggctacgggcaggtgtcggtgtttgcgctcggccgccgacgggtagtggtgcacgttgatgctggggatgttcagcatcttgagcggcagcgcgtacacatagatcgacatgggctcttggctggggcagatgcttcggcccgtggggttgtgcacgttgaccgacacgttctccacctcgctgcccgtaaagtacgtgtgctgcacctgcagctgattgtcgccgcggtggcatggcgtcgagtcgggcgtgtactgcgacaccaggatcagcgagggctggctcacgcgtacgtggatacccgtctgcaggagtcgcgtctcgtgcggcagcaccggcgtatcgccgcgactaaacacggctttcagcacgtgccccgaaatgggacccagtacggatatcatttcgggacaacggcgaccgcgcgactccatgctgcctgcgcgtacgggtgtaggcgactgagcggcgcgccctctgcggccgccgccttacataggcaggcgaccaaacgcggaacccgaaataaaaacgttatacacagagacaaccgcggattattgagtgtctttttttattacaaaaaaaaagaggcaaagccccaccgtcaccacaccccatcacacaccaccaccgattttttttgttttaatcccgtattgcgcggacgcctagtgtccgttttccatcaccagggtcctctgtttagagatcgccgcagaccatggctagagtgacaggactcgttttctctgtcgtattttccgtaagcttacagtcttgcggttccgtctccggggacgccagtcgcatgggcagcaggtcctccagcgcgatggaagcgcccagcaccgagagctgctgttgcgacggcgaatgggacgtggaccgcgagtgtagcgtggatttgacttggtgcgtcattgctgacaggcaaccgcgattcagcgtatgctttgacgagataaaatagaggcgtcccaggagcgcgtcccgtgggaacgtggcgccgttctcgtcgcttaccagtacggttaattccaaccaggagcgcggtagccagaccgtaacgggcattttgagtccctgacggttgtgtggtacaaaaacacccagataaggcccgtaaaagcggcggtagatacgtaacgtgtgcgagtttttcagcgtcaattcgtaagggacgcgcacctccagtccctcgtccgccgcgccggagcgtggcggtacaaagtaaggcagtggcgcgtccgaaaagaagggtcgtcgcaccgtttcgcgtcgcagccgcaggcgaaacgccactgggtcggctggcgcctcggtgcggtcgcaggtcacgttgaaacgtaatatgccgtcttggtatagcgtgagtgacgacagcgtcaggtccggcggtgattcgttcgggtctagctccaatcgtccaaagacggagggtcccaatgtcttggcagtggtttccgagaggcgcgccgaaatacggctggtgagtccacgcggccccgagatgccgccttccactcgatgccagcacagcgcgtgtcgtacgcgcaccgtcagtgtgggcgtcagatccgcgtccgttgattccgcggtatcagcgacggaagccgcgttctccgttacgttgtttatatccagcgtcggctcgaacgtgagttctggcagatgcagcgccagacagtcgtgtaacgccgtgtgatgcgcggctttacgtcgtagcggtagccgtttcagcagcggcgtgatgatacggagcgcgaagagattgagtgataagcgcacgatggccatgcgcgtcagttgttggtcaattaccgagcgcaggatatggcagcctgggcgtgcgggaaagagagagaaggccgggcgcacgtcagaatcctcgttagagaccacgcatagaatgccgcgttcacgatcgtcgttgcggtcatcctcgtcctcttcttctttcttctcttctttttccttttttttctcgggctcgtgggaagccgccgtttcttcttcttgcgacgtcgcgggggcggtttgagactcgccgttcgcttcccccaattgcagcggcgtagagagcaaaatctggaagggatcccgcaattcttcgggtcggaggtcgaggtgcaactggatcagatggtaggtgccgcggtgcacccgaggctgacggatgtcgtgtttatccgtcagtgtgaggatggtctgcggtgagccgctgtgcttgtccagctcgtccggcgttttcaggaggagactgtcgtcgtcggtactggcgacacccatcatggtcgtggtggtagtggtggcgaggaaagtgagcggcggcgtcgacagagctcggcgttggcggcggcatttgccgctgtgtcggctgctattgctgccaacgccaccgccgccgcctcgtctggctcgtggccgacgggcccgattccgaaggttggggtcgacgcgtggcatgcttggtgtctgcgggcgcgagagggccggctcagcctttaaatatgcaggtcgcggatttgttatcgggtgaaacgtcacacaccgtgaagacgacctgttcgcggatgaggtcatccagctgtcgcagcatgacgaaaagcgccgacagccgcgcgatctcgtcgtcgggcgacacgtgctgcggccgcgcgggcgtgcgcggctcgccgacgctgcgctcgcggtccagccgcatcagcagctcctggcacttgacgagcagcatggagctgtcctctagcgctaacttgcgcacgtaggtcatggtcagctccgaggctaggttagccaccatggacatggagaggcaggcggtcttcatgtcgatcagcaggtgctggtcgatgaccggatcggggatggtgaaggtggcgtcgcgaaaagtaatggtctgcagctgctgcacggcagcctttacctcctcgtacgaacggtcgagcgagaagaggcccatgatgagtagtcgctggttgatttccagcgccagtggcatgggtacgatccagggcagcaccagctcccactggcccagcgtcagcaggttctcgcgcgccagcggtccgtggaagagcggcggcagcacgcatagcgcgtcgcccttctcccaagtcacgggtcccgtgttgaggacggtgtagagcagtccgtgcgtcggtacgtgtaggaggatctggttgccttctacgcgccgcatcaacgtcagcgtcatattgcgcagcaggccgcgcagtcgtacgtagccgcgggtgtgatctacgaactggtgtaggcccagctggtagtgcttgatgagatgtagacgctgcggaatgggcacaacggccgctactagtttggtcagtttgcctacgtcggcgatgctgagcttgtggtcgaaagtgcagaagatgttggcctccatggccgccatagcggcggtgaaatcctggccgcgacggaggagaagcggagacgaacaacgtctgcaccgggcgcggcgtcagagcgagcgtggcgcgtccgggcccgcgtttgcgtctaggtgactcgccgctaacctgcggtcgtcgccgtcctcctcaccggacggcctcacgagttaaataacatggattgctgcagcgggatgatttcgcctacgacgtagttaccaaagtgcgtttcggacgtagcaaaagccccggcgccacccttgagtttggtctccatcagcgccagcgtggtggtgctgaggatcggtagcgcttcctgcgtcagacggcacgggttttcgatgagttgttccgtgccttcgacgcagacgtactgcgtgtccgtgtcgccgcggatgcagtccttggcgcgtagcaggtactcgtcgatggttttgaagagcgttttgttggccgcgataatctcttctgtgttaaagtactgcgcgcaagggctgtagaatttggagttgtagcctagacgttcgcgatgtcgggtgttgtagagtacgtcgctcagacagccggcttgcgaggcccaggggttgtgtgtggccgcgaaagtctgtgcgtccgcttcgcgatggtcgtagatggccttggtggcggcctccgtgtcgtacggatcgacggccagcatgcaggaggcacgcccgcgcgggttgttggggatcttaaagtaattaacgtccatcgtcaccggcgtaaggattagttcgcacgcggccttttgtccgtgcaccgtggcggcggcattgcgctcggacatgctgccgaacgtcagcatggagatggtctccgtgtctaacagttgcggccgttctacgccggccgcgtgccggatccagcggtccacctcgtcgtgccggtacacgttcatagggaagacgcgaaagaggtcctgcacgcggacgcccatgtcggttcgcacgcggtttacgtaggctacgcaggtatttgacgtgtaacccagacccatgtctacggtgttaatgttctgcgtgacgtggtacgtggtgctgatgtcgcgttcctccttggtcacgatagggttgttgatgataactgacgtgcatgatttgccgctgtagagcagcatgtccacctcgaaggtgtcggtgcgtacggccgtgagtgcgaatcccgggtggatgtgcgccttggtctgcagcaccagtgaaactggtgagattttgtataacatggcggccagcgtcatgactgagtgcaacacgttgggacaggtggccgagtaacgcgaaaagggcgagcgcagccagttgtggtactcgtgcgcgaaggctgtgggtagcgggaaaccaccgtcgtgacggtgatagtgcgggaactcggtcacgtagcgtttaatgtcgtcgctcaacgccgcgcagatggtggggtttgagtagaaacggtggaaaggtacgggtaggctgtactcgatcaacgtcttaggcgccgtcacgacgcagcagccgttgtaaagcacgtgctgacgtgagataaagtccggcaggccctgacgctgcgcgtggtccagaggcgcgcgcacttcgagcaccttgacgtgctcgcccacgaattgcacggccaaaaacagttcacgacaggcctgcagcagcggcgtatgtgcgtcggtggcgacgtcctccaccagctcggtcagcatctcgcctacggcttgacgttgcgccgctatcgagtcttcgggggtgacgccgcttgtgctctctttcgacgtcgtacctgacgtggagaccgcggtggcggccggcatcaggagaaacgccggtcggtaaaagaggtctactagcagcgtcttgaggttgagtcccaggccgcaggcccggttgttggtcatggcgggcatgaggcagagataaaagaccttttgtaacgtccattcgtcgtcggtggcacggtaatcgtccacaaacagcggctcgtcggcatccatggcgcccaaacgcggtacgtccgaaacgccgtggtgtcgcgcctcgatgttggccgggttcaacggttgccggtcggccactacctgtacgccttccatgttacgcggcaggtgcgtaacgaaggggggccacagccggtggtcgtgcagcgcgttcacgtaagccgatagcggttcctcagccagttgaccgttgttaagtcccggcagcgctgagatgcgcgttaccagacgcagcacggcgaccagattgcggtagtgaaagagcaactgcggtggtagggcgccatcagccaggtgttcggcgatcaacgtcaccagcgcgtagctgtgcgcaaaaaccagcagctgacgtgtgtgaaacatgttgacgatacaacgtgctacgaaagtgcggattagcaaaaaagcgtcgacgttgccgtgtaccagcacgtcgaccaggtagcaaagctcggggtaattggggcttgtaacggtggttttgaaaagtcgcaacgtctcttcgtagtcgggtggtggccgcagtcgcatgtgttccatgatctcccaggtgcgcagttcgtggaaggggcccggtgccagtccatctggcaaattaccgatgacgatacgcggtgtacacagcgccaccgtttcgctgttttcctggcagtgcgtaaagtcgaagaaggggtgcagctcggtgtagagcgtgatgttgcccaccttgtagaagtcggtgaccacaaagtcctgcttcatttcgttcaccgtgcgcgggacctcgcgtcgtacgcggtaaaaatgcggtatgcggcgcgccgcaccgcccatgggttcctgctgaaaacgacactcgagcagtcgttgcatggcgggttccgagggtggtccgcgttccgtgaaggtctgtagacagggcgcgggctcgtgcagcaccgggtggcacagcgtcttgagcgcgtccacaaagtctattttttgtacggcacggtcccggtttagcaggtaggccgtggtgggcaacgcgttgcgaacggtgtcgttaagcttaactttgctttccaccgtggtgtaaccgcgatcctcgggcagatacagccctacggggaagaaaaacgtcaggtccacgttacgttctagcggatctttggtatcggtgtttttgtagacgcgccgcaagttttccataatcaccgttttttcgcccagtcggatcacgtccatgctcagcggcgttaagctgtgcgccccggcctgcgaaagcgagtcgttgggcaaatgcggttggcccgaagtcagatgagccttgtacgagttgaaatcggccaggatcgagtgataggatatggcagtgacggcattttcgggactgagtacaaaattgccgtaggtggccggcgccgagaccgtttctttggtgatgtggcttgagagcagcgacatgatgatctgcataacgttggccgtgcttaccatcacgccactgatcttggcccccgagctcgtggtgtacgtggtggggttgtctaggatgctatcggtggccgcttcggccagacgcgtgaggaacttgagcacatagtcgcgatcgcgcgtgcgattcagcaaaaagagcgtggccagcattttggccttgaagctctgcaagatgttgcttcgctggatgcggttcagcgcctgtcgcgccagcgtggcgttctctaccagcgtctgcaccacaaagtacggcggcgccttgcgtagcagtgtctgtaaaaagctgtgaatcaagccgcgttccatggcgtcggccgtgtttttgagcgcgcgcagcaccgtgtgcatagcttccacgttgaggatcttgtccaggatggtgccttcgaacgtctcgcgcagatacgtgaggcaggctgcgctgagctcaaaggggatggtgatgggggatttttcactgtatttggtgaccataatggtggtctgacgactggtaggcaaaccggcgccgctggccacccgcggcacctgtacgtggaacagcatttttcccgtagtcagtttattgaggtcgtggaacttgatggcgtgcgccgccgcggccaagccgctggtcaaaaaataaacccattccaggcgattgcagaaggtgccgaagatggcttcgaagtgaatattgtaacgctcggggtcatcgccgtagtagatgcgtaaggcctcgaacatctcctcgccggcgctggtcttgacgtgcgtcagaaagtcagtgggaatgcctactttaggcaggagctcgagcgccgaccagttctccatcgcggcggcggcgtgagcgcgaggcgtcggagctcggggaaagcagcgcgacccggagaatggccggcgctgcgccgcgccgcctcggctgtgacgctctaatagtcgtcggcggctccgctatgccgcgccgggttttacacgtccccgtgcacgttcgcgcctgcaacctcacccaagagctatcgacgggcgaggacgcccgcttctgtcgtccgcgacccgttaacgtcgaacgggtgcgcgctgtttttgcggctctctaccgtgcctgtccgatacacgtgaggaccgaacccgagcgtgtcaagctggtactgggtcgtctgttactgggacccgtggccgtaccctgtttttgcgacggtgaagtggagggccacggtgaacatctggtacctacgacgcagttttgtcgcgggccgctgctctacgtgcaccgacgttgttgttgcggatccgtgaccgccgggcgcgcgctgtcctaccacgttctcgaaaaccacgtggccacgcatgtgctacgcggattgctctcgctgacggaatggaatcgagaattgccgagcctcttttgcgactgtcctggcggcggtggcgcctcgggaaccgaggaacgctacgctatggcctgcctgccgcgcgacctcagcctgcacctggacgactatccttacctgatggtggaaatcggacgcgtactcagtgtcagcgaggtagacgactacgtaaccgccgtctccggctacctgggcgaggccgcggcgccgcgcatccaggttcactacaagctgctctttggactcaacgtgcgtccgcaagcgccgtgcgcgttggacgctacacgcgacttttttctgctggagctgcaaaagctttggctgggcgttgaatatcaccacgaagtgacgtcggagtttttcggtcgcgtgctggctcagctgcatcgcgaccgcgcccgcgtcatgatggcgcttcgcttgcccgagcagacggtgtgccacctgagcaccttcgttctcagtcgcttcaagcgacaggtactgtacttcaagttacaggtgagctacggcaagtgccggactggccacgctgacagaagtgggggagggggaaacggtggaaatcagggacaccacaacctgctgtgttatcgacgccttagcgtcacgtttgccgacacggacacggtgtggagaaaccttttctacgtttattatgaactagctcgggatctggggtcccatgggacagagaaccgacccgtaaaccgcggttacggtgtttcttgcgctccgaggacgtcgcggctatcaccgtcagaatcgacggtggtttcggcgaacggacacgcgctgtcttccaccgcgctcccgacgacgagcgcgggtcacaagctgtcactgccgcgcgacccggccgccgatcgcgttcgacgttacgtgtgcatcatctcgcgtctcatgtacgctcggtacggggagagatggcgtaaacaccgtcaacggcggtcggagacgggagaagaggaggaggaagagacgctggaatcgggggagactgacgccacgccgccatttgactttacggggcagcagctgcgccgggcctatcaggaacaccgacgtcgtaaacatctagccgtgcagcgttacgcgccgtgtcgtcgtaagctcatcggcgggatggagtttgccgaggtgacgggcgtgagtctggaccgcatcgccgtcaacgctttcaacaccaaccgcgttatcaatatgaaggccgcgctctcgtccatcgccgcgtcgggtctcggcgtgcgcgcgccgcggcttcccaagaacatgacccacagttttgtgatgtacaagcacacctttaaggagcccgcttgcaccgtcagcacctttgtttccaacgacgccgtctacatcaactcgctcaacgtcaatattcgcggttcctaccccgagtttctgtactcgctgggcgtgtaccggctgcacgttaatatcgatcacttttttctgccggccgtggtgtgcaacagcaactcctcgctggacgtgcatgggctggaggaccaggcggtgatccgctcggagcgcagcaaggtgtactggaccaccaactttccgtgcatgatctcgcatactaacaacgtcaacgtgggctggttcaaagcggctacggccattgtgccgcgcgtctcgggcgctgacctggaagccattctgctcaaagaactctcgtgcatcaagaacatgcgcgacgtgtgcatcgattacggtctgcaccgcgttttcacgcaactagagctgcgcaattcgtaccagatccccttcctggccaagcagttagtgctgtttctgcgtgcttgcctgctcaagctgcacggtcgagagaagcggctgcagttggaccgcctagtatttgaggcggcacagcggggtctctttgactacagcaagaacctcacggcgcacaccaagatcaagcacacttgtgcgctcatcggcagtcgtctagccaacaacgtgcccaagatcctggcccggaacaaaaaagtcaaattggatcacctgggccggaacgccaacgtgctgacggtgtgtcggcacgtggaagcccacaagatccctcgcacgcgcctcaaagtgttagtcgaggtgctgggcgtgttgcagagtatcagcggtacgccgcacacgcgcgaagtgatccaccagacgttgtttcgattgtgctcggcggccgcagccacatcgggcctgtgttcatcccctcccccattgtgtgtgtcctcatcttcctccgtcccttctgtcccaacctccgtcagcgttgacggcagttctgaacccacgtcgccgcgagtgcggtttgcatcacgatgatggaagccgcggccgctgccgccgcggcgtttcgtccggaggagcgtccgacgccgggttggcacgacgcggcgttgttaatggacgacggtacggtgcgcgagcacgcgtttcgcaacggaccgttgtcgcaactgattcgccgtgtgttaccgccgccgcccgacgccgaagacgacgtggtttttgcttccgagctgtgtttttattgcagcggtcgttttaaccgcaggtcgtccgtcttctccatctattggcagaagcatagcgatctggtgtacgcgcttacgggcattacccattgcgccaagttggtggtggaatgcggtcagttggggagtagtaggctacggtggcgcgacggtgatgcgagtggtgaggagcgccggggagacgacgacagcagggacgagctgtacgacgtgccgggcatttatatgattcgcgtcaacgacggcggcagcaccggccccagacacgttatttggccgggtaccagcgtgctgtgggcgccggacgttgtgatcactacggtgcagcgacgaatctcggcggcgcgcgccctggtgaacacgttccgccaatatttttttttgctggaacggcgctcgcacgaggagctggttctttgtccgcccgagatggaggagcgtctagcgccgttgttgcagagtgccacgcgaggtgattcggacatgtttgacggtgtggtggccagcgcttatcaccgtttgcgaatgagtaatattccgcgttcatccgcccgtctgctggagcactgcgtggggctggcgggtgctaagaagctgctcttgctcgacgtgccgcgtctggagaactattttctttgtcaagtctgtctttacgagttggacgaggacgagatgggcgaggagatgctgggcatgttggccggaaagcccgaggatgccgccgtctcgggcgcaagcggcggttttctgctacatcgcaagacgatgaagctggccgcctgtctgtgtttgttgctcaattcgctgcatttgcaccaggaggcgctggaggccttggatcctccgccgccgcgcgtcgaggagaacgaccttgtcaacgtggtgctgcgccgttattatcgcagtcacggcggcgtgcaggcgcggacgctggcggcggcccgggctttgttagccgactacgctgaaacgttttcgcctttggggagttttacgcgcctgggttacgatcgtctcgtttctgccgatgccggcgtcagtcgccggcacctggtggctctgctgcgtgcctagctgaccctgaaacggatggcgtgtatatcgtcacacaggtaggtggccatgatgacggcgatgataagatcgtccgagatacgattctggcgcttggccgagtagcgtgccgtcgtgccttcggccagcgtgacgcggtgcaggttctgaatctgctccagaagatactcgatggggtcgtggctcagcttgatggtgtaggagacgagctcttgcgaggctttgatgtagcccgagttgaaacgcgagatgaactgttccacggccagcgccttgtcgcggcccatgaggtagaagggctgttcgatgtggttctggtcgggcgtgtggtagaagagcacgcggatgagcgtgctgctctgcacgctctgtcggatgaggcaggcgatgcgcacggccgccgcctggttggtgttgccctccacggcgatacgcagttcgtccaggtaagggtgcaggctcagcaccgagatgatcatgtgcgccgcgcactcggcgatggctacctcagaactctcggagaggtcgcgcaaaaagaaatgctctaggccgtaaatgagaaactggtgtcggtaggcgcctacggccgccacgcccgtgcccgaggccttgcggttggtggtgaaggccgggtccagatacacgtaaagcgtcttgccgaaataatcgtaggcgttggtgttgagcgtgctgtaacgcaaaatatcgaactcttcgcggctctggtccgtgatgagcacggtgttctgcgagattttattggtaccgccgatgatctcgtccatgaaagcgcccggcataaacatgttggccgtcttgcgcacctgcgagttgaggctgatgaaggtgggcttgtgcagtcggtagcaaggacacgccgtggcgtcgcccttctccgtgaagctgtgcaggtgctcttcgcacacgtaagagaccacgttgagcatgtcaaagggcgcattgttgaggcgcgtcaagaaacacgtggcgtcactggtagtgttggtggacgatatgaagatgatcttggtggtattctgggccaggaaccccagaatggtgttgaaggcctctttcttgatgaagtgcgcctcgtccaccagcagcaaatggaagttttgtcctcggatgctctgtgtagagaggagacagaaaagggactcttatgattacgcacgctcggctggaagcctacagagtcggggtggggccggacaggtgagccaggtgagccgccaggtgaggcgggatcgccgtgtgccaaccgggctgcgacctgaaaaccggaaccaatccgccgacaccggcgccgcgtgacgcgcgcccataaaaacgaaagtgtcgtcgtcgcgacccgccacagccgccatgaactcgttgctggcggaactcaaccgactgggggtcgcgcacgccactacggaggatgtttttatctttgtcgaccgcctctttcaacacttttccttccttttccaggccgaggagtcaggcccgcgccgcttggaactggtcgcgtccgtgttcgagcacctgacggtggagtgcgtcaacgacatcctggacgcctgcagccacccggacgtgaacgtcgtggagacaagcaacacctgtcgtccctgcccttctcctgttccctccgcccccaaaactgtcagcgacgctcagacgtcatgtgcgacgcctcgggcgcctgtgacatgaggcacgtccagaacgcgtttaccgaggagatccagttacactcgctctacgcgtgcacgcgctgctttcgcacgcacctgtgtgatctgggcagcggctgcgcgctcgtctccacgctcgagggctccgtctgcgtcaagacgggcctggtatacgaagctctctatccggtggcgcgtagccacctgttggaacccatcgaggaggccgcactggacgacgtcaacatcatcagcgccgtgctcagcggcgtgtacagctacctcatgacgcacgccggccgttacgccgacgtgatccaagaggtggtcgagcgcgaccgcctcaaaaagcaggtggaggacagtatttacttcacctttaataaggttttccgttctatgcataacgtcaatcgtatttcggtgcccgtcatcagccaactttttattcagcttatcatcggtatctactcaaagcagaccaagtacgacgcgtgtgtcatcaaggttagtcgtaagaagcgtgaggacgcgcttctgaaacagatgcgttccgaatatggaaacgcacctgtattcggatctggcgtttgaggcgcggttcgctgacgatgagcaattgcctctacacctggtgcttgaccaggaggtgctgagtaacgaggaggccgagacgctgcgctacgtctactatcgtaatgtagacagcgctggccgatccgcgggccgcgttccgagcggagatgaggacgacgcaccggcctccgacgacgccgaggacgccgtgggcggcgatcgcgcttttgaccgcgagcggcggacttggcagcgggcctgttttcgtgtactaccgcgcccactggagttgctcgattacctacgtcaaagcggtctcactgtgacgttagagaaagagcagcgcgtgcgcatgttctatgccgtcttcactacgttgggtctgcgctgccccgataatcggctctcaggcgcgcagacgctacacctgagactggtctggcccgacggcagctatcgtgactgggagtttttagcgcgtgacctgttacgagaagagatggaagcgaataagcgcgaccggcagcaccagttggctacgaccacgaatcaccgtcggcggggcggactgcgtaataacttagacaatgggtcggatcgccgtttgcccgaagcggctgtggcttctctggagacggccgtcagtactccattttttgaaattccgaacggagcaggaacctcctccgcgaacggcggcggcagattcagtaacctggagcagcgggtagcgcgtttgttgcgcggcgacgaggaattcatctatcacgcgggtccattggagccgccttccaagatacgcggtcatgagttggtgcagctgcgcctggacgtaaatccagacctcatgtacgccaccgatccgcacgaccgcgacgaggtcgcgcgtacggacgagtggaagggtgccggtgtctcgcgtctccgcgaggtctgggatgtgcagcatcgcgtgcgcctccgtgtgctgtggtacgtcaattccttttggcgcagtcgcgagctgagctacgatgaccacgaagtcgaactataccgggcgttggacgcttatcgggcgcgcatcgccgtcgagtacgtgctgattcgcgccgtgcgcgacgagatctacgctgtactacgacgggacagcggcgcgttgccacagcgtttcgcctgccacgtgccacggaacatgtcctggcgcgttgtttgggaactttgccgtcatgccttggcgctctggatggatcgggcggacgtgcgtagctgtattattaaggcgctaacgcctcgtctgagccggggtgccgccgctgccgctcagcgagctcgtcgccagcgcgagcgctcggcgcccaaaccgcaggagctgcttttcggaccgcggaacgagagcggtccgcccgccgaacggacttggtacgctgacgtggtgcgctgcgttcgcacgcaagtggatttgggcgtggaagtgcgcgcggcgcgttgtcctcgcaccgggctttggatcgtccgtgatcgccgcggacgcctgcgacgttggctctcgcagcccgaggtgtgcgtgctctacgtcacgccagacttggacttttactgggtgctgccgggcggctttgccgtctcttcgcgcgtcactcttcatggcttggcgcagcgggctttgcgagaccgattccagaactttgaagcagttcttgcaagaggaatgcatgtggaagctggtcggcaagagccggaaacaccgcgagtatcgggccgtcgcttgccgttcgacgatctttagtccggaggacgacggctcgtgtatcttgtgccaattgctgttgttctaccgcgacggcgaatggatcctctgtctttgctgcaacggccgttatcaaggccactatggcgtgggccacgtacatcggcgtcgtcgacgcatctgtcatttacctaccttgtaccaactgagcttcggaggtcctttgggtccagccagcattgatttcttgccaagctttagccaggtgaccagcagtatgacgtgcgatggtattacgcccgacgtgatttacgaggtctgcatgttggtgccccaggatgaagccaagcgcatcctggtcaagggtcacggtgccatggacctgacctgtcagaaggcagtgacgctaggcggcgccggcgcctggttgctgccgcgtcccgaaggctacacgcttttcttttacattctgtgctacgacctgtttacctcatgcggcaatcggtgcgatatcccttccatgacgcggctcatggcggcggccacggcctgcgggcaggcgggttgcagcttttgcacggatcacgagggacatgtagatcccactggcaattacgtgggttgcacccccgatatgggccgctgtctttgttacgtgccctgtgggcccatgacgcagtcgctcatccacaacgaggaacccgcgacttttttctgtgagagcgatgacgccaagtacctatgcgccgtaggttctaagaccgcggcgcaggtcacactgggagacggcctggattatcacatcggtgtcaaggattctgagggccgatggttgcccgtcaagaccgatgtgtgggacctggtcaaggtagaggaacctgtgtcacgtatgatagtgtgttcctgtccggtgcttaagaacctagtgcactaacggggtctgacagttcacggggagaagaaacaagaaacaacaaaaaaaaaagaggacatggactcgccacggtttgtggcaaggcgtatattatcatcatggagctactcacgttggtgttgtagcaactggcaaaaagcgccgtgctcttggcgccgcggtggtcgatgctgatcacgttgtccttgttctcgaccacgtagtcgcgcgcgaaggtgtggcggcagcggaactcgacctctttgagcacaaactgcgacacgtgcttttggtgcgccacgtagccgatgctgatgccgatcatgtgcttaagcagaaacgagataatggggatgatgaaccaagtcttgccgtgacgtcgcggcaccaggaacacggtggctttctgcttaaagatgtcgatggaggtctgcgagaggaagtcgatctggaaggcgtggatgaggtactgcagcacgcgattggccagcacggggatcttggtcacggctataaaaaagatgacgtgtatcaataaattcttttgaaacggttcgagtcggatggcttttgcgtcgccctcgacggcggtactgaagccgccgtcgagccactttttaaagtcggtcatgaagttgttgatctgctgaaactgcggatcgcggtagagctcggtcaacgcgtccagcttctggtaggaggcgcgctgctcctcggagcacgggcgaaacgtcagttcatcgagcgcactcttgaggcgctcgtgaaacagcagctcgcgctggctttcctcgggcgagttgtagtcgcggtggcggccgcagaaggccatgagcggcaggaaggcctcgttgcacgagtgggccagcccgagttcggggtgcatcatctggtagcgcttgcggcacagcgccgccacattggtgaaggccgtggagatgcaggaggtggggtggctcttgcgcttctgcagctccgcgtagcgctcctggatcttggcggccgaatctccgcgcaacatgatggcggcggcggtggtgcgagcggaggttaggcggcagcggcgagaggagaggaaaaagatggcgtccgcgaggacgacggaggatccacctgaaaaccacgttgtcgcggacgtggcttgtgggacgggcgccgtcactcgttcgtcttcgtcgtccctagtggtgtcgtcttcctcggcgtcaggctcagacgaatcttcctccgcctctcctctcagtttccccgtctcctctccctcaactgccgtcaggtctccggggtccgccggggtttcgacgtccctgtgctcggtggaacggatggtcgagctgtcggcgcagtctccggccgccgatttctcggtctccgaggcttggcgcttcgaggaggccgtaaatatggcgctggtggcctgcgaggccgtgtcaccttacgatcgctttcgtctaattgaaacgcccgacgagaatttcttgttggtcaccaacgtaattccgcgcgagtcggccgaggtgccggtgttggatagcagtagcagtggtggcgatagcgggccggaggacaaaaagaaaaacgtcgggaataaaaccgcgggggaaaagaacggcggtgggtctcgggccaaacgccgtcgtagacgacgcgctccgaaaaacgacgccgccacgccgtcttttctacgtcgacacgacgtgctggagcgtttcgcggccgcggctgagcctttgccgtcgctttgtgtgcatgattatgcgttacgcaatgctgaccgtgttacctacgacggcgaattaatctacggcagttacctgttgtatcgcaaggctcacgtggagctgtcactctccagcaacaaggtgcaacacgtggaagccgtgctgcgacaggtgtacacgccgggcttgttagatcatcacaacgtgtgcgacgtggaggccctgttgtggctgctgtactgtggaccgcgcagcttttgcgcgcgtgacacctgtttcggtcgcgaaaagaacggttgtcctttccccgcgttgttgcccaaactcttttacgaacccgtgcgggactatatgacctacatgaatctggctgagctgtacgtctttgtttggtatcgcggctacgaattccctgcgccaacgccgcaggcgacgacggcgggtggtggtggtggtggtggtagtggtggcggcggcggggccggcgcttgtgcggtcgagacgagcgcgtcagcaggccgggtcgatgacgccggcgacgaggtgcatttgcctttaaagcccgtctcgctggaccgtctcagagaggtgttacaggcggtgcgcggccgcttctcggggcgcgaggtgcccgcctggccggcctcgtcgcgcacctgtttgttgtgcgcgctctacagtcagaaccgtctctgtttagatctcgcgcgtgacgaggcgcggaccgtgagttatagccccatcgtcatccaagactgcgccgcggctgttaccgacgtcactttgagccacatcttgcccggccagagcaccgtctcgcttttccccgtctaccacgtcggcaagttgctggacgctctctcgctgaacgacgcgggtctcatcacgttgaatctatgacgtcggtcaacaaacagctcttaaaggacgtgatgcgcgtcgaccttgagcgacagcagcatcagtttctgcggcgtacctacggaccgcagcaccggctcaccacgcagcaggctttgacggtgatgcgtgtggccgctcgggaacagacccgatacagtcagcgaacgacgcagtgcgtggccgcacacctgttggagcaacgggcggccgtgcagcaagagttgcaacgcgcccgacagctgcaatccggtaacgtggacgacgcgctggactctttaaccgagctgaaggacacggtagacgacgtgagagccaccttggtggactcggtttcggcgacgtgcgatttggacctggaggttgacgacgccgtctaacaggtatagcaatccccgtcacgcctctgttcagattttattaaaaaaaaaacacaccataacgacagtgtcggtgtggtagctagtgcagccctaggaacagggaagactgtcgccactatgtcctccgcacttcggtctcgggctcgctcggcctcgctcggaacgacgactcagggctgggatccgccgccattgcgtcgtcccagcagggcgcgccggcgccagtggatgcgcgaagctgcgcaggccgccgctcaagccgcggtacaggccgcgcaggccgccgccgctcaagttgcccaggctcacgtcgatgaagacgaggtcgtggatctgatgaccgacgaggccggcggcggcgtcaccactttgaccaccctgagttccgtcagcacaaccaccgtgcttggacacgcgactttttccgcatgcgttcgaagtgacgtgatgcgtgacggagaaaaagaggacgcggcttcggacaaggagaaccagcgtcggcccgtggtgccgtccacgtcgtctcgcggcagcgccgccagcggcgacggttaccacggcttgcgctgccgcgaaacctcggccatgtggtcgttcgagtacgatcgcgacggcgacgtgaccagcgtacgccgcgctctcttcaccggcggcagcgacccctcggacagcgtgagcggcgtccgcggtggacgcaaacgcccgttgcgtccgccgttggtgtcgctggcccgcaccccgctgtgccgacgtcgtgtgggcggcgtggacgcggtgctcgaagaaaacgacgtggagctgcgcgcggaaagtcaggacagcgccgtggcatcgggcccgggccgcgttccgcagccgctcagcggtagttccggggaggaatccgccacggcggtggaggccgactccacgtcacacgacgacgtgcattgcacctgttccaacgaccagatcatcaccacgtccatccgcggccttacgtgcgacccgcgtatgttcttgcgccttacgcatcccgagctctgcgagctctctatctcctacctgctggtctacgtgcccaaagaggacgatttttgccacaagatctgttatgccgtggacatgagcgacgagagctaccgcctgggccagggctccttcggcgaggtctggccgctcgatcgctatcgcgtggtcaaggtggcgcgtaagcacagcgagacggtgctcacggtctggatgtcgggcctgatccgcacgcgcgccgctggcgagcaacagcagccgccgtcgctggtgggcacgggcgtgcaccgcggtctgctcacggccacgggctgctgtctgctgcacaacgtcacggtacatcgacgtttccacacagacatgtttcatcacgaccagtggaagctggcgtgcatcgacagctaccgacgtgccttttgcacgttggccgacgctatcaaatttctcaatcaccagtgtcgtgtatgccactttgatattacacccatgaacgtgctcatcgacgtgaacccgcacaaccccagcgagatcgtgcgcgccgcgctgtgcgattacagcctcagcgagccctatccggattacaacgagcgctgtgtggccgtctttcaggagacgggcacggcgcgccgcatccccaactgctcgcaccgtctgcgcgaatgttaccaccctgctttccgacccatgccgctgcagaagctgctcatctgcgacccgcacgcgcgtttccccgtagccggcctacggcgttattgcatgtcggagttgtcggcgctgggtaacgtgctgggcttttgcctcatgcggctgttggaccggcgcggtctggacgaggtgcgcatgggtacggaggcgttgctctttaagcacgccggcgcggcctgccgcgcgttggagaacggcaagctcacgcactgctccgacgcctgtctgctcattctggcggcgcaaatgagctacggcgcctgtctcctgggcgagcatggcgccgcgctggtgtcgcacacgctacgctttgtggaggccaagatgtcctcgtgtcgcgtacgcgcctttcgccgcttctaccacgaatgctcgcagaccatgctgcacgaatacgtcagaaagaacgtggagcgtctgttggccacgagcgacgggctgtatttatataacgcctttcggcgcaccaccagcataatctgcgaggaggaccttgacggtgactgccgtcaactgttccccgagtaacctggacgcggaacgtgacggttgccgaggggaaaggcgacagagaaggtacaaacccaccggcggggaaaatactgaggcgccgccatcatcatgtggggcgtctcgagtttggactacgacgacgatgaggagctcacccggctgctggcggtttgggacgatgagcccctcagtctctttctcatgaacacctttttgctgcaccaggagggcttccgtaatctgccctttacggtgctgcgtctgtcttacgcctaccgcatcttcgccaagatgctgcgggcccacggtacgccagtagccgaggactttatgacgcgcgtggccgcgctggctcgcgacgagggtctgcgcgacattttgggtcagcggcacgccgccgaagcctcgcgcgccgagatcgccgaggccctggagcgcgtggccgagcggtgcgacgaccggcacggcggctcggacgactacgtgtggctcagccggttgctggatttggcgcccaactatcggcaggtcgagctcttccagttgctggaaaaggaatcgcgcggacagtcgcgcaactcggtgtggcatctgttgcgtatggacacggtctcggccaccaagttctacgaggccttcgtcagcggctgtctgcccggcgccgcggcggcggacggttcgggtggcggcggctcgcactacacgggctcgcgcgccggcgtctcgccgggcatccagttcggtatcaaacacgagggcttagtcaaaacgctggtggaatgttacgtgatgcacggacgcgagccggtgcgcgacggcctcggtctgctcatcgaccccacgtcggggctgctgggcgcttccatggacctgtgcttcggcgtgctcaagcagggcagcggtcgcaccttgctggtggaaccgtgcgcgcgcgtctacgagatcaagtgccgctacaaatatttgcgcaaaaaggaggacccctttgtgcagaacgtgctgcggaggcacgacgcggcggccgtggcctcgctgttgcagtcacacccggtgccgggcgtggagtttcgcggtgaacgcgaaaccccgtcggcacgcgagtttctgctttcgcacgacgcggcgctcttcagggccacgctcaagcgcgcgcgcccgctcaagccgcccgaaccgctgcgcgagtacctggccgatctgctgtatctcaataaggccgagtgttcggaagtgatcgtgtttgacgccaagcacctgaatgacgacaacagcgacggggacgccacgatcactattaacgcgagtctcggcctagccgcgggcgacgccgctggcggcggcgctgatcaccacctgcggggcagcccgggcgattcgccgccgccgatacctttcgaggacgaaaacacgcccgagctgctgggccggctcaacgtgtacgaggtagcgcgcttttcactgccggcttttgtcaatccgcgtcaccagtattactttcagatgctcattcagcagtacgtgctcagccaatactatataaagaagcatccggacccggagcggatcgatttccgcgacctgcctaccgtctacctggtctcggccatcttccgcgagcgcgaggaaagcgaactgggctgcgagttgctggccggcggtcgcgttttccactgcgaccacatcccgctcctgctcatcgtcacgcccgtggtctttgaccctcagtttacgcgccatgccgtctctaccgtgttagaccgttggagtcgcgacctgtcccgcaagacgaacctaccgatatgggtgccgaactctgcaaacgaatatgttgtgagttcggtaccacgtccggtgagcccctgaaagatgctctgggtcgccaggtgtctctacgctcctacgacaacatccctccgacttcctcctcggacgaaggggaggacgatgacgacggggaggatgacgataacgaggagcggcaacagaagctgcggctctgcggtagtggctgcgggggaaacgacagtagtagcggcagccaccgcgaggccacccacgacggccccaagaaaaacgcggtgcgctcgacgtttcgcgaggacaaggctccgaaaccgagcaagcagtcaaaaaagaaaaagaaaccctcaaaacatcaccaccatcagcaaagctccattatgcaggagacggacgacttagacgaagaggacacctcaatttacctgtccccgcccccggtcccccccgtccaggtggtggctaagcgactgccgcggcccgacacacccaggactccgcgccaaaagaagatttcacaacgtccacccacccccgggacaaaaaagcccgccgcctccttgcccttttaactcataaactttcaggtctcgcgtacgattcgcgagtcgggaatgggacacccgtgggtgtttctccgtgtgtatattattttttttttttgtgtgtttgcgcccccgtgtgtctaatgtgctgtttgaaacacgtaaagtagctggtggaagaacagataaacctttaataaaaaaaaaagtatgtgctcccgacccacggtctgcgtgtctcttttttatgtccatgtctccaagtctggtgcgggtggcggcggggttaagcgtcctcgaagtcttcatcatcgtcgtcctcttcttcgcggaggcgacggctttccaagctgtcgtggtgactgagcgcagcgacttcttcgccggaggctgtggccagcgcctggtacttgacactgccgctaccgcgtccgcgaaagtagcggacggcgcgacacgtcgtaaacatggcccatatgaaaaagagcatgccgaacgaccagctgatgccggtgcggtattcgttgctgaggaaggtatcgtactgcacgatggggtagatgaggccgcagagtccaaagaaggcgcccaggtggtagccgaattgcaccttgacgtattgaaaaaagacggcctcgatcagtaaaaagtagatgatggagatgatagcgtagaccacgaagacggctaacaccatgtggcctgtacgcacgaaaaagttgtttccgaagccgtagcacagggccatggctaccacggtggtgttgaaaccaagcgctacctctaccaggttgacgatgagcgtgcggaactgcaccgtacctttgagcttggggtgcagacgcgagaagaaaaagagtgagcgtttgtagctgcggtactgcgtgaccatgctcacgttgaaaatggtcaggcagaaaaagtgtacggcggccatgaaggcgatcatgctgggcagccgaaatgacatggtcagtgtgaatagttggaacgtgtccatgctgagaatgaagaggaaggctgtgaggctgtcgcccatgtacgaaatgtcgcgtgtcgactggtttaggctcatgcctttgtccttgcgcatgctgatcttgatccagcataccaggtagtagatggtcacggctaaaaagacgagctgcatgaacacggcgtagcacaccaactgcaccgagtctaagaaaagcataggcgtgtgcaggtgcattacgttgtaggccgacatgttgagcctttcaaagtccacgacgtgatagtagacgcaggggtagcccaggtgcggaaaattgctcagcactagatgcacgctgacgttgacaaaagtcagcaccatgaaaacgatagaagcgctccatgtccgtgtattcaccttatccacgtgcgagggggccatggcgatagcggcggcccgctcgctcgggaggcgatgggggcgcgccgatgacgacaggctcgcgggtcgttaaatactacgatgggagccgccgcggctcacgacgcggtttgagcacgtccgggcggtcggtgaaaaaagaccccgcgggccttcgcgactctcttctgtccgaggatgaccgctcagccgccgctgcaccaccgccaccacccgtacaccctgttcgggaccagctgtcatctcagctggtacggccttctagaggcctcggtgcctatcgtacaatgtctgtttttggatctgggtggcggccgtgccgagccgcggcttcacacgttcgtggtgcgcggtgaccgtctgccgccggctgaggtgcgtgctgtgcatcgcgccagctacgctgcgctggcctcggccgtgactacggacgccgatgagcgtcggcgcggcctagagcagcgtagcgccgtgttggcgcgcgtgttgctagaaggcagcgcgttaatccgcgtgttggcgcgcaccttcacgccggtgcagattcagacggacgctagtggcgtggagattttggaggccgcaccggcactgggcgtggaaaccacagcgctgtcgaacgcgcttagtcttttccacgtagccaagctagtggtcatcggctcgtatcccgaagtgcacgagccgcgtgtggtcacgcatgccgcggaacgcgtctctgaagagtatggcacccacgcgcataaaaaattgcgtcgcggttactacgcctacgatttggccatgtcgtttcgcgtcggcactcacaagtatgtgctggagcgcgacgacgaggccgtcctggcacgcctctttgaggtgcgcgaggtgtgttttttgcgcacctgtctgcgtctggtcacgcctgtcggtttcgtggccgtggcagtgaccgacgagcagtgttgtttattgctgcagtcggcctggactcacctttacgacgtgcttttccgtggtttcgctgggcagccgccgctacgcgactacctggggccggacctctttgagacgggcgccgcccgttctttcttttttcccggtttcccgcccgtgcccgtctacgcggtccacggtctgcacacgttaatgcgcgagacggcgttggacgcggcggctgaggtgctctcgtggtgcggcctgcccgacatcgtgggctcggccggcaagctggaggtggaaccctgcgcgctctcgctcggcgtgcccgaggatgagtggcaggtcttcggtaccgaggccggcggcggcgccgtgcgtctcaatgccacggcttttcgcgagcgaccggccggcggcgatcgtcgctggctgttgccgccgctgccgcgtgacgacggcgacggtgaaaacaacgtcgtggaagtcagcagcagcaccggcggtgcgcacccgccgagcgacgacgctactttcaccgtgcacgttcgcgacgccacgctacatcgagtgctcatcgtggatttggtcgagcgcgtgctggccaagtgtgtacgcgcgcgcgacttcaatccctacgtgcgttatagtcatcgactccacacttatgcggtttgtgaaaagtttattgaaaatctgcgttttcgctcgcgacgcgccttctggcagatccagagtctgctgggttacatctccgagcacgttacgtcagcctgcgcttcggccggccttttgtgggttctgtcgcgtggccaccgcgagttttatgtctacgacggctattcgggtcacggacccgtctcggccgaagtgtgcgtgcggactgtggtcgactgttattggcgcaaactttttggcggcgacgatccgggtcccacctgtcgtgttcaagagagcgcgcccggcgtgctgttggtctggggcgacgagcggttggtgggtcccttcaacttcttctacggcaacggcggcgccggtggtagtccgctccacggggtggtgggtggtttcgcggcgggacattgcggtggcgcttgttgcgcgggctgcgtcgtcactcaccgccattctagcggcggcggtggtagtggcgtgggcgacgcggaccacgcgagtggcggcggtctagatgccgctgccgggagtggtcataacggcggtagtgatcgggtttctccctccacgccgcccgcggcgttaggtggctgttgctgcgcggccggtggcgactggctctcggccgtgggtcatgtcctgggccggctgccggcgctgttacgggagcgcgtgagcgtgtccgagctggaagccgtgtatcgcgagatcctctttcgcttcgtggctcgccgcaacgacgtggacttttggttactgcgcttccagcccggtgaaaacgaagtaaggccgcacgctggggtgattgattgcgcgcccttccacggcgtgtgggccgagcagggccagatcatcgtacagtcacgcgatacggcgttggcggccgatatcggctacggcgtctatgtggacaaggcctttgccatgctcacggcttgcgtggaggtctgggcgcgagagttattgtcgtcctccaccgcttccaccaccacttgttcttcttcttccgttctctcctccgccttgccgtccgtcacttcgtcctcttcgggcacggcgacggtgtctcctccgtcttgttcttcttcgtcggcaacttggctcgaggagcgcgacgagtgggtgcgctcgctggcggttgacgcgcaacacgctgctaagcgggtggcttccgagggcctgcggtttttccggctcaacgcttaacgagtcacgtaggggaactacgtgggtaagtgacgtggatactagtaaaaaaaagtgcgtcaaagttctcagcgtgtgacgtggatactagtaaaagggacgtcaaagctcactacgtgttgcgtgtttttttttctatgatatgcgtgtctagttcgcttctcactcttcctctccccgttcccagcgcggtggcagcttggggggtgagggcaaattggggtagttggcgttgagcacgtctagcaggcccaggcccacgggccaaccgtccacggtcttacgctcggtcagcttgaggctaaacgagtgtgcctcgtcttgaccggtaaggcggaaaaagaagcgtgctaccagctgcaggcaggtatgccgcgtctgctggaaaagcacgaaggtagcgggcacgtactgcacaatgtgcggttctttttcctcaaagagtaggtagagcgcgctgcagatcagccgccgggcgctgtggtgcagcagccggccgaagctttcgcgcacgttcaccgcgtctaggtactggagcaggtcgtgcaggcacttgcgcgttaagttgcaattttccacgcatgaaataacggtacagagcgcgaagtgcagcaggttgtcggccttgacgatgccgcagcggtgtttgagccgcagatccgagagcctcacctgcgtgacggcgtcttcggtctcgagcaaaaacacggcggagtagcccagaaaggccgaggtgcacagcaactcgctgcggtactcggccatggaaaccagcagcccgtgctccgtgtgcagccacagcttgtcgccgcgcaccgtaaagtcgagcacttgcggctccatgatcatcacattctgtctagtgaaatccgtatggacctccagcacgccgcggatcatcagggcctccatttcgaaatcggccgacacgctctgggccgcgccgctcctcgtctgccgtgatcaagcggcgcggcgcggacctttcaagcgttcctgggccgccgctcgaggcagttcccctttctggcactccgcccgccgcttcgcggctcatttggcgccggcgcgccttctcgcggctgcaaatcaactccacgtatcggcaaaacttgctgtcgtcgtaggcggcggctacgatctcgccgaaggagagctgcaggtaggcctcgggtacggggtccagcgtgcccagcgccaggatgtgacacagatagggcagggtcacgcgctctaccgtgtaattggagtatacgatggcctcttcggccccctgatgcgtgaccagacgccgcaggcgaaaggtgcggaaatactcgttttcccacagctgcgtgaggaagcgttccagcgactcggtgccgggcacgaactgcgagaagaagctgttggccaccaggcggttgtcctccaccgccagcggacggaagggcgccgcgtcgcgcgccttgcgcacggcctccaacacgggcaggtggtacagttcggcgtcgcgcgcgcccaggctcatggagtcctcgcgccgcgaggcgtagcgcgtgagcaggtcgcgcagctcgcgcacgcgattctcccaggtctggttgagcgtgcgcaggtcctggatctcgtccacctgcgactggatctgctcctccaggcacttgatgacctgcttcttaaacaggtcgcggatgtcccgctcgggcgccgccgggccgggtggcggcggcagcagcccgacgtggcccgcgggtcctcccaccacggcgccgccgggtcccaccacgccgggtccacccggaccacgcgcgggtagtagacggttttggtccaccagcgagggggtcaggtcctgcagaaaggactcgacgctgtcctcgatgccgatgcgcgatttgctgtccgagacgttaagcaaaaacttcataatggactttttggcgtcgctgccccggtcgtgctgctccatcatctccaccagcttcttgcagttgagctcgtggcggctggcggtcaccactttcacaggaaaggtattgagcaactggcagatcttttggtggcggcagagcccgtcgtagcgcagaatctcctcgtgcaggtgtgccaccggcgtggtgaacagcagcttgtcgcgctcataagccagcggttcggccgccacgtacaagcggatgtgcttgccgcgcagctgcgcctccagccgctccgagcgcaccttcttgaagacgcgtacctcgggcgcgttggctatgcgcacggcgcccaggcgctcggccacctgcagcagtagcgccaggttagcctgcagcaggtcctgcgccagcgggtgtgtctcggtggcccgctgcacggccgcgcgtacaaattgcgcccgctcggccgcctcgctcggcttggtcttcacgtccagcagcggtaccagtcccaccgttacgcaccaatccacgtagagaccatagtcgtcgttatcggcgtactgatataaaatgtcgcggagcgcgcccagcacgcccgtttgcacgctctggcgcaacgaggcgctccacaccaacagatactgctccaggtcctcttcgtccagcgcgcggtagggaaacaacgccgcgtgtaacttccactcctcggccacgcgccgcaccgtgatggtgtcaaagagcgtcttgcacactccgtagagcagctgcttgcgcagcacgcacgggtcgcgcagcacctggtgcatgctctggccgcgacacgtccccagaaagccgtgcagcaaccgcaggaagctcatcgtctggcccgtggggaaaatgtcgatgacggcctcgtcatccacgccgcggcccacgcccaagtacgacgacgccttgatcctcaacctctcgtcggccgccaagatcgaacggatcgtcgacaaggtcaagtccctctcgcgcgagcgctttgcgcccgaggatttttcgttccagtggtttcgctccatcagtcgcgttgaacgaacgacagataacaacccctctgccgcaactaccgccgcggcaacggcgaccgttcactcctccgtctcctcttctgccgccgctgccgcttcgtccgaggccggcggcacgcgcgtgccctgcgtcgaccgttggcccttctttcccttccgcgcgctgctcgtcaccggcacggcgggcgccggcaagacttccagcatccaggtgctggcggccaatctagattgcgtgatcaccggtaccacggtgatcgccgcgcagaacctcagcgcgatcctcaaccgcactcgctcggcgcaggtcaagaccatctaccgcgtcttcggcttcgtcagcaagcacgtgccgctggctgacagcgccgttagccacgagacgctggaacgctaccgcgtgtgcgagccgcacgaggagaccaccatccagcgcctgcagatcaacgatctgctcgcctactggccggtcatcgccgacatcgtggacaaatgcttaaatatgtgggagcgcaaggccgcttcggcctccgccgcggccgcggccgccgcctgcgaggacctctcggagctgtgcgagagcaatatcatcgtcatcgacgagtgcggccttatgctgcgctacatgctgcaggtggtggtgtttttttactacttttacaacgccctgggggacacgcgactttaccgcgaacgccgcgtgccctgcatcatctgcgtcggttcgcccacgcagaccgaggcgctggagagccgctacgaccactacacgcaaaacaagagcgtgcgcaagggcgttgacgtgctctcggcgctgattcagaacgaagtgctcatcaactactgcgacatcgccgacaactgggtcatgtttattcacaacaagcgttgcaccgacctggactttggcgacctgctcaagtacatggagttcggtatcccgctcaaggaggagcacgtggcctacgtggaccgcttcgtgcggccgcccagctccatccgcaacccctcgtacgccgccgagatgacgcggctttttctctcgcacgtcgaggtgcaggcttacttcaagcggctgcacgagcagatccgcctgagcgagcgccaccgtctctttgatctgcccgtctactgcgtggtcaacaaccgcgcgtaccaggagctctgcgagctggccgacccgctgggcgactcgccgcagcccgtcgagctctggttccgccagaacttggcgcgcatcattaactactcgcagtttgtcgaccacaacctctccagcgagatcaccaaggaggcgctgcgccccgcggccgacgtcgttgccaccaacaacccctccgtccaggctcacggagggggaggatctgtaatcgggagcaccggcggcaacgacgagacggcgtttttccaggacgatgataccaccaccgcgcccgatagccgtgagacgctgctcaccttgcgcattacctacatcaagggcagttcggtgggagtcaactctaaggtgcgggcctgtgttatcggataccagggcacggtcgaacgtttcgtggacatcttgcaaaaggacacgtttatcgaacgcacgccctgcgagcaggcggcctacgcctactcgttagtttcgggcctgctcttctcggccatgtactacttttacgtgtcgccctacacgaccgaggagatgttgcgtgagctggcgcgcgttgagctgcccgacgtgagttcgctctgcgccgctgccgccgccacggccgccgctcccgcttggagcgggggagagaatccgataaataatcacgtcgacgcggattcttctcagggcggccagagcgtgccggtatctcaacggatggaacatggccaagaggagacccacgacatcccctgcctgtccaaccaccatgacgactcggacgccatcacggacgccgaactcatggatcacaccagtctgtacgcggatcccttttttctcaaatacgtcaagccacctagcctggcgctgctttctttcgaggagacggtgcacatgtacactaccttccgcgacatttttctcaagcgctaccagctcatgcagcgtctcacgggcggtcgcttcgccacgttgccgctcgttacctacaatcgccgtaacgtggtgttcaaggccaactgtcagatcagctcgcagaccggctccttcgtgggcatgctttcgcatgtgtcgccggcgcagacgtacacgctcgagggctacaccagcgacaacgtgctcagtctgcccagtgaccgccaccgcatccaccccgaggtggtgcagcgcggcctttcgcggctggtgctacgcgatgcgctcgggttcctctttgtgctcgacgttaacgtctcgcgcttcgtcgagtcggcgcagggcaagagtctgcacgtgtgcaccaccgtggactacggcctcacttcgcgcacggccatgaccatcgccaagagtcagggcctgtcgctcgagaaggtggccgtggactttggggaccatcccaagaacctcaagatgagccacatctacgtggccatgtcgcgagtcacggaccccgagcacctcatgatgaacgtcaacccgttgcgacttccctatgagaagaacaccgctatcaccccctatatctgtcgcgcgctcaaagacaaacgcaccacgcttattttttgacacaacaccgtgtaaggaaaacgtgactttattgagcagggtaaaaaccacgtacaagaaccacgttgtctatccccaaaaaacacacaccgtcagggaacacatcgcctatagatagcggcacttcacataaaaccaccgtacctgcatcacggtggctcgatacactggaaattcaataaaaaccaccgtgtctccgtgacggtacttatcgggtcagcatctttctcttgagatttttgttcgtaaacttatccgtttccccggtccgcggtgtctcctcgtaaggctgacagtctacgagtggtacctgcaagagaagaaacccgggtgggagcgacgccgtcgctgggtatcaaccccgcggctgaccgtcgtccggtaaaggaacaacccgtcgtcgcaagccgggttcgaccaagagaaaaacccgggtgcgggggggagacgggtcgtcctttggttgttcgcggacggcgtacatcccgcgtgggtcagtcgacggcgtcgctccgtgcggtcggtcatcattctgcttcacatatatgggttgtttgtgtttttttttttataatgaatacgcactgatcctatccgtgactgcgcgtgtggcagagaggatgccttataacatgtattttgaaaaattgccaacagctataatttctctcatgtagcagaatagagaccttttgtcgtctttttgtttgtcattacttgttttccagggaattagagagagggaaccgcgcctccggcggcggtgcccgcggaccccggccccttctcgcgtgcgcggtgtgactggttgagcgaatgagcagctaggcttggtggtgctccgcgtgcgggggagaagacgattaacaacaaaaaataagtggaagtggccggtgggtctttgtccgcgtgcgcgcccatccgtcgccgggaccgagcagaaagtgatgtggtggtacattgattttttccttgacaggaaagaaaaaaaaagagttttgttttcctatgtgagaggagaaaggtatgtgaggagatgttcgatgatcgtatgttacagttatgctgtaaggaagcttttatcgtgcgtcctgtttttcatttgatgtatatgacacaattgaaacctatcgataggcgtatatcgaggattcatcaattcttagaatcgtcgtctttttggctaattggactttgcccatgttggttgtcattcgtggcctgaggtcatcgtcgtccatgacgacgtgtctatagcgtgcggtgtgatcattgtgtcgagccagagaaagcgcgcctcgcacgacgtttgcggatcggctcgcgggtgtgtggaattcctaagaacataatcagctggtcgtctttctttgatgtgttgttgtcgtcgaggtcttgcttcgttttcttttttctttttagtcgatggaacttttcttcggtacgggttcttgttatggaagcttgtgttttcgaacatgaattcgaaaaaataaaaaggcctatcttcgtttcaaaaaaaggacagatatcaatcttcttaacttatatcatggtaaattcagaatcctatggtgtcttattatctctaaagtagtcaacattatggtctaatttgtatttccctgacgagatatatatgatccttataacctggctactatcatgaacaacaatatccttacttacagtcatcttcgtgagttaatgaagtataatatcggtcatctatcaacttatctgctatgtaacgtacccttttaggtattttgcgtttcttaacgagtgtacccgcctgtgtgaggcgaaactctgagaagtctaccgagtcgagttacaagtcactaaaacacttacacgagttatctatactaaaatcactatctatgttgtttgcttacctaattattatcctacatgacgaagctacctcccaacgtaaggtagggggagaggagacagaacaataaaaagtaactaatgtttcttagaacttacccgctaaggacttaccaaactatattcaccaaaaaacaacagctacgtgtttcatttgttttaatctaccgaagtaaaaaaaaaaagatgattagctatccagaacctacttacttcttaatgttttaactaaggatgcctatgggattggaaaaaaaatcacagcaacttgctactaatcagttgacagcgaagagactcataacaaagatttctgggtaatacggttataataatgcttatggactaaaggatacttggaaaaaaagaatgggctatgactatagagattcgttgagatatcaaacttcaaataggcggctatcattcatggttgtggtgactatatcgtggagaaaaaatgtgatcgttagttagctaggtgagacttacagctatccatccgtctagtttttcgttgtaatgatgatagtacgtctatggtggtgatcgattttggttagcaatttgttcgtttaaaggcttaatgtacttatgctacatgatgtattattctttgattcatcgttcctcctaagggggtgtatgtatgtatgtactagtcgtatagtgttcctaacatcatgactattcagactatggcttcatctatcgtgtctaaagttcacctattctactattactatatatatgcactactatgtaactaggatatggtcctataaggtgtcttctatcacggtggcttgtttatcgcttggcggttacgagcaagagttcatcacggaccagccgtgaggcagggcacacgcgggtcggcggcgatgatgttccccgcgaaggggacaacaaaaacaagacaagaggccgccggccgcggccacggacgcgtagcggttacacaatgtttggttgagcgttttgtttcatcgtcgtggtggtggttttgttgttctctgtatatatcgtgtggtggctttatcgtcatcattattatcatcattcttgtttccatcatcacgatgagttttctccgttttcctctcctccagtggtagtcgtgtatcatcatcaatcatcgtagtgacgtcgttgctgctgctgctcttgccttcatggcggtatttctcttcctcccccctaaccccatattaactcgtgagtgtgatggttagagtggctgcttgttttttttttcttttctctttggaacaacaaaagaggataaagatggtcggtgaatgtattattattatcatcatcattatgatacggtcgcggtcttcttctccgatgacgaaacctgcgcacatcgaagaaaagacgagcgcgcgaaccgatagccgtccgtctgggacgaaggagaagatgatggggagaggaggagagccccagaagccagagcgagaagggagacgacagacatacgtcgtcaccgtcctctggaggaggcacggcggcgctgtttgttgtttggatgcttgattatatcctgttctatggggtagattattatcaataggcttggttttcaaaggtcagcctgtgtattgtcgtgtcttttttttcgttctcatgatcgcggagaccacacagacgtgcgcgtctcccaatggctaggcgttctttttaggtagtaattttttgatcttttttttttcttaacaagtctggcttgatttcttttatctatgatcgattcttctttttctcgggggttgcatcttccgtgaaagtaaagtgacactactctaaatggtaaccatattatctgttgattaggagaaaaaataattttttcgcacgaaatcgatcctaagtgaggtgatttacttgctatcacacgaaatgattatcttttgctgctaacgtactgaattttttaacagaattgcttctccgtaactatttccgcagattcagacagattgtcaaaaaaaaaatacggcacagaaatagtgggtctgtggcttttggttcgtgtacattcgcgtttgcgtgtcgagatttctacggtatgtttattcttcctgcgatgatgtagggtccttggtgtaagtaggatttcgagtatctctcttagagcgaacaaaataatcaaaaaacaacagctaggaaatcgagggttactctacgataaagtgtctctacaaagtgaagaatgttacgttgtggtggaataataagactcgcgtgatcgatgagtgatcgagagcggctcgaaccttctttaagagctttgtttagtgcaactttaaattacaaggagtagaaagctgaaatgaatctatgaaggtgctattctttgaatatcttactttgtacgcttcacattcgttatttggatagagagttgtctagagaaaatctgtgattctctatgagtgttatttttattatccttttggggactacgatttttcttcttgttctacataccactactactcgtaatcacatacatggacgaaaaaaaaattcgtcaggcagtagataccagattctccgacgttacggcgtctttttttcttttgagagagtatctgctgagattgtccgtggtgtatctagtcgctatttttgttgttactagtagttttgcacacagtttattcagtatagtttttcttcttgccatgatcaattgagcccaccacctttttttttagagaggaggaatttcgtcttgatctccagccggagacaacggcggcggtggtggtggtggcgggagagacttcaaggcaatgaaaaaaaaatttcgttttgccatcaagtggtgacgataacccgtcagattgataattggttcctacagaaactattctaaccgcggaagaaagaaattgaaaaaaaaaattgacaaaaacatcataacataaaggaccacctacctgggacgcgcagttgggcggcggattggggcggcatgctgcggcgatgctgtcggtgatggtctcttcctctctggtcctgatcgtcttttttctaggcgcttccgaggaggcgaagccggcaacgacgacgacgataaagaatacaaagccgcagtgtcgtccagaggattacgcgaccagattgcaagatctccgcgtcacctttcatcgagtaaaacctacgttggtaggtcacgtaggtacggtttattgcgacggtctttcttttccgcgtgtcgggtgacgtagttttcctcttgtagcaacgtgaggacgactactccgtgtggctcgacggtacggtggtcaaaggctgttggggatgcagcgtcatggactggttgttgaggcggtatctggagatcgtgttccccgcaggcgaccacgtctatcctggacttaagacggaattgcatagtatgcgctcgacgctagaatccatctacaaagacatgcggcaatgcgtaagtgtctctgtggcggcgctgtccgcgcagaggtaacaacgtgttcatagcacgctgttttacttttgtcgggctcccagcctctgttaggttgcggagataagtccgtgattagtcggctgtctcaggaggcggaaaggaaatcggataacggcacgcggaaaggtctcagcgagttggacacgttgtttagccgtctcgaagagtatctgcactcgagaaagtagcgttgcgatttgcagtccgctccgatgtcgttcacccagttactttaataaacgtactgtttaaccacgttgcgtcgtgacgttgtttgtgggtgttgctaggcgggctggaaagatgatgtataaatagagtctgcgacggggttcggcgctctgccggctgcggcggcactcgctccacggcctccgacgagcgttgcgctcgcgctttgcgccgccgcgtcatggatctgcctactaccgtcgtgcgaaaatactggacttttacgaatcctaaccgcatcctgcatcagagcgttaatcagactttcgacgtgcgccagttcgtctttgacaacgcccgtctggtcaactgcgtggacggcgatggcaaggtgctgcacctcaacaagggctggctctgcgctaccattatgcagcacggcgaggcttcggctggcgccaagacgcagcagggcttcatgtccattgacattacgggcgacggggaacttcaggagcacctctttgtacgcggcggtatcgtctttaacaaatccgtctcctcggtggtgggctccagcggacccaatgagagcgcgctgctcactatgatttccgagaacggtaatttgcaagtgacttacgtgcggcattacctgaaaaaccatggcgaatcctccggcggaggcggtggttgcggcgccgcgtctaccgcctccgccgtctgcgtgtcctcgttgggtggcagcggcgggactcgcgacggcccttctgcggaggaacagcaacggcgaaggcaggaacagcgtcacgaagaacggcgcaaaaaatcgtcctcgtctgccggtggtggtggaggcggcggcgctagtggtggcggtggcggcggcgggagcggcggtcagcactcctcggactccgccaacggactgctgcgggatccccggttgatgaaccggcagaaggagcggcggccgcctccctcctccgagaacgacggtgagtcccggccctcctcgcgtcacggtgctttccgagtggactcgtgagccccccgtagcgcacgagcgagcaggcgagcggtgttggtgcgctggtggttgtgtggatgataaccatgtgctttttcgtgcgctatgtgtcgtcccgtctgtaggctctcctcccctccgggaggcgaagagacaaaagaccaccgcacagcacgaaggccatggcggcggcggcaagaacgagacggagcagcagtccggtggtgctggcggtggtggtggcggcggcagcggccgcatgtcgctgccgctggacacgtctgaagcggtggcctttctcaattactcgtcctcatcctccgcggtctcttcttcctccaacaaccaccaccaccatcatcaccaccataacgccgtgacggacgtggccgccggcaccgacggtgcgttacttctacccattgagcgcggagcggtggtttcgtcgccgtcgtcgacgtcgccgtcgtcacttctttcgctccctcgacccagcagcgcccacagcgcgggcgagacggtgcaggagtccgaggcggcggcgacggcggcggctgcggggttaatgatgatgaggaggatgaggagggctccggctgaggcggcggaggcaccaccgcagtcggaggaggagaatgattccaccactccagtctctaactgccgtgttcctccgaattcgcaggaatccgcggcgcctcagcctcctcgcagtccgcgttttgatgacattatacagtcattgaccaaaatgctcaatgattgtaaggagaaaagattgtgcgatctccccctggtttccagcagactcttgccagagacgtcgggcgggactgtcgtcgtcaaccacagcagcgtcgcgaggaccgccgcagctgtctccacagccggcgttggccccccagcagtcgcatgtccgccactcgtcaccaccggtgttgtaccctcaggttccgtcgccggtgtcgcgcccgttgccgccgcagtcgaaacaccagctgctcctccccggcccgtgtgtgaaatcaagccctacgtggtaaaccccgttgtcgccaccgccgcggctgccagtaactcttcctcgtcttcttcggctccactgccgccgccaccaccaccgccgggcggacgtcggggtcgggcccggaacaatacccgaggaggcggcggcggtggtggcggtggtagaaacagccggcggcaggccgcatcgtcgtcgtcttcctcctctcggagatcgcgacggagaaacaaccgccatgaggacgaggacaacgatcctctgctccggttgtcgcaagtcgccggcagcggccgccggcgagggccctcgttcctcgaggacggactcgaaattatcgatcccagcgaggaggctgcgatcgccgccgcctcgatcgcggcgtttttcgacgattaaaaaacagagccgagaccggaaaaattatgaaacaggacgcgcttggacatttgggtttccacccctttcggtgtgtgtctatatatattgtggtcactgatttttttttacaataaagtagacatcacagttcaccaccttgtctccccggtgtatctattatcatcaatcacccacagagtcgccagtccatggtctctcggtaatgcgtgtccagatacgcgttggccagtataaagtggtcgttgcccacgaaggcgcgggtggtgttgcgcggcgacgggtggcaggacttgagtaccaagtgccgccgtcggtcgatcaggtactcgcaggtgtgcgcgtcggcgccccacagcatgaacaccagatgctcccggcgctctgacagcctccggatcacatggttactcagcgtctgccagcctaagtgacggtgagatccaggctgtccgtgcaccacggtgaacacggtattgagcagcagcacgccgcgtcgcgcccaggcgtccaggcaacccgaggccggacgctgaaacccgtccaccgtacgcgccagttcgcgaaacacgttgttgagggagggcggcggcggtcggcccgccagcgtgccgaaggccaggccgctggcgctgccgtcgcagtacgggtcctggcccacgatcaccacgcgcacctgctcgggcggacacagatagctccagcggtgtacgtgctcgggtgccgggtacaccatctcgagttgccgcgcgccctccaccgccgccaccgtgtcgcgcagcagcaccgtgtcgtggtcgggcaagctgaggaagcggatccagtcggcgctcagacaaaacacgcgagcctgctcgtcgggggttaacagagagcctttattatcagcaatgttagcgagcatccactgcttgagggccatagcgcgagtgagccggcaggttgacgcgcgtctgcttcagctcgggcggcagtccggcgtagtatttatctaggtggcgtagcagcggcgggtccagctggtgacgcaggcagaattccttcactgcgttgtacaggccgtaaaagagcgtgatgccctcgggcgcggcagcggtgctcacgggcagacgcacggcgcggttggtacgcgtggcttcgttgcgtatggccaccaccacgttaaagagagacggtggcaccagctcgaagcctaacacgtgttccgtgaagatgctgcgcccgtatgacagtcgcgtgaggtcgtagccgcggcacaggtcgtccacgcacgtgtacacggccggcgagccatcgccgcactcgctgtagccgcgcatcaccgtcatccagcgcggcgctgtgtccgagctcaacagcgtcagcagggcccgcaattgatccggattgttgtacagcagggccagagtgtccaggaaagcctcgtccaacagcacggagttggcggcctccggcgtaacgggacggtaacggataagttgcgatagcgggccatcgcgcccggtaacattcaccaacgggcgcagccaactttcatacttgtcaccctcaaacacctcacccaacaagcatcggcgcgttagttcggggcactccgcggggactttctcggcggcggtaggagcgacgctgacggcggctgaggaaacaatgggcagcagaaggcaacaccacagcagtatcaccggtccaggtgagaaagagaagccgcaatccgggcggcggcacatcaagtctgcggcacgatgagagtgtgacggtaaggagccagttggcgccaaaagttggcactcaggtcttcgatccctaaaacgttatatattgcatccagcaggtgagccaggctaaacggattcacgtaccaggtttggttacccgcgacgatgacggccagaccgtgggcgctacagttggagaggttcctgggtacgaaggtaactgagtcgatgtcgcgccacggggggaatgagacagacgactggcgcacgctgtaatcacaactgtgattgacgtattgtagcgtgtaatttaggttgcactcagcctcgaagtagagggggaaccacagttcgtcgtactcgtcgtcgtcctccagttctggctcttcttcatccaccgcaatgtctacgctgctctgagattcctcttcgtacaggatgattgacaggttatggctacaaaggtcctgggcgggaggacgcgtgggagcgcgggtggtggtaatgttttccaggtcaaaagttggagtgtagtcggatgttacatccccgttgttggaggtggtagaagtcgcggccggtgtcacggtggtaagtatggatacagaagaggagggggaagtagcgttcgtaccgatggttgtggtattattattccttgtatttcttgttccagaaaccgttgacgttgagatgagaatcgacgtggcgctggacgtcagattgctgaccgaggaaaccgtggtgggagtggtgacggtgttactcgtggttgaagtgacgttaggggaggtagtagtggtaccggtggtggcgacggtagtgtttgtcgtggcggcggcagcggtggtactggtaacggtggtcgcgttggtttccaccgcttcacacagtaagcaaaagcacagggccaggaaaagcaaccagccccgccatcgccgccgccgcttcatgaggtgggcaggcgaaagctggtgaattcgttgtacagcggcaagtggggcgccgcgatcgaagggtacgtcaacaagctgacgttgatattaaatacgtctggctgcttttctacgatggaagcgcacagggttacggcgtcgaacaggtctttcttggtggcgcccgagacccacatctggtatacacccgtctcgtggtacgaagtagagcgcggcaccaccggacggatgcagtccagaacgcggttgggatcctggtgaaagaatttgaacgtggctacggcctgtggcgtgtgcggcatcgtctgcgtgatgagctgctggcccgctaacacggtgacgttgtgcaacttgagcagggcactcttgagggcctggaaagcgttgccgcacgaggcgctgatttgcagctgcacggccgtggagtcgtgcagccgcatgagacgtgacacctcttcgaagacgtacttatacttactggcaaagagtggcgcgtaccgacagtcggccggcaaaatgtaggtggcgttgccgccgttggtggccacggcgggcgcagcggccgcggaggccggcgtaaacagcgtcagcggccggtggtggctggtaaggtcgatcatgggcggcgtggtgaccgtggcggtggcgggcatgacggggtttgcggcgacgggcactccggccacagcggcggcagcggcggccacggcggcgctggccgagcccacacctgccggcagtcctccgccacccatgacgccgccgggcagagcgtcgcccagacagacttccacagtggcgggcgcgctctcggcggtcagtacggtttgccgatcgacctcgcgacgaaagctggtgaggaactcactatgatccatggccgcagggcccgagatcccgggattctgcgggtgctgaccgagtgcgggccgagttatatggaagacgattagcttggagcggagttttgcgtccctagctgacctgcggatcagcgacgtgccatagggatagactgtgagcggcggccgcaacggcggggtcggccgccgttcgtcgtcacggggcggcgcgagggaggaggaggtggtggtgggtacgatcttgacgtggttaacgtcctgcccgtccgggggaatacgcaaaaaaccccgccgcggcgctaccacgatggtgcgatgggtctttctcttgttggccggggccagggacttgcagatgcgtgtggagccgtagacgatctggacgtggtcctgggagaacatgaccatcgccgccaacgctcagcggggggacgggttgggaacacagaggctgaggggaaaccccgtagaagtcagcgaaataaaaacaacacagcagccgctcctctcgtttcgggccctaccactgcttgaagtagggcaccgggtgtttcttttcttcaacgggctcctccagtctcttataggaccagtcccgccggcgcgccagcatgtaggtcacgtacaaaagaataattaccatgaacaccaggaaagccagcacgccgtaggccagcagccggtcctcgaacagcgggtcgctcttgataaacacgtaggtggtggtaaaacttcggcccgcgatctggacgtggagacgcacgacagtatacgtgccgttgaggtagaagacaaactcgcgtaaccgttgtccgttatacgtcacgttactaatattccacggcggaatgagctggtcgccctgatgcagatgcacggtgctgttggggtgatagaggctgctaccgttgagcaagcagtgttcgtgttcctgaagcagcacgcggacccgcatagtggtagcgttcaagcgagtcccgtacacggcgtaaatgggataggtgaaaaggtcccaagtggcgttgtgatggcggccccagctgaagaaagagcacgtgtactcagtggtctcctgcggcctgagtcccgagataagcagctcttgagcagtagcgttgtaggagagatgtagttttcctgtggaaaaaattaatgagttgtttattttgttagcaggttggcgagggaggaaggggaacaaaacagaaaggtacgtgttacttacctttatcgttggagggaaaagcgctaagatatcccacctgagtgaagggacccttgcagtctgtccgtgcataacaagtaactgataaaatgtctggatttttggtattattcaacaggataactttgcaggtggcgtttagagacacttggtcgtagctgtagctggcttcgcaattcacagtatacaggtgcccctctttctgcgtcgtggctatcacggaggtggaggcggacgaggtagaggtttgtaccgtggtggtgacagcagaactgacgttgttagaggtacttattgacgtagtagacgtgacggtggtattactaggggaagtgacggcgcttgtggtgctacttttcactcccgggtgcatgtcgcccaagagcgcaactacgagcgcgatcgccagcacggaacacatgttgccgtgtgacgagacggcgtgtggacgagctatatgtggcaggaggtcgcgtcacctcttgtgacgcctaaacgtccagctccagataaaagaggcgttaataatgaacactacaaaaaccacttgcgtcaatatgacgatcataaaggctcggtgatcgctgcgcctaaagtatgcgggattctccaccagctcactatcttcgacaaagtggatgaatgtgttagtgttaccggccgttttgttgaccatggatcgtactatgaaagtcccggcgccaaaagttccattagagccccagcaagtaacgctgccgttcacgtaggttcccggctctcctgtcagcatgtgtgtcagttggtgggtataattctgtttaatgttttccatgtcctcgctgtaattaacttttctggtgagaaactgtgtacggtgcgggagaacgatcatcatccctgaggccaaaaagggcgaatcataagctgttgtgttacaaaaaatagtcaggttagtatcattgtgctcatagatataagccatttttacttgaggttcataccaccaccctaccctaattgtagttgccaccgtcaccgagtcccatctcccgaaacttaccaccgccaccactaatagcgtcacccccgcacggtacatagttaccctctcgacgtcgccggctgtcaatgacgtgcctgcgtcagtggctatgatttatagcttttggacacaaccgcaacggatctgtcgtaatctaccttccacagggccgccgtgacgatgctgaacgacaggatcagacagacggcgtacaggagtcctaggtcggcgtcgacacggcaggtgcggatgtctcgcagggtgggtagatgggcgatgcacaactctttctccccccgcccgtacatcccatctcgtatcagcagccgtagcgtggcattgatggtcagcggggtaaccaaagaaatcacatagggatgtgtacaggaagtacagtgatgggtatccgtgagatgtacgtcatcaccctcctcaccctcatcatgaaagaccaggactcgggtgagacgacccgatgaatactggatctcccaccacagtctttggtccaacaccgagagggcgcaagagattctaagtctccctgggttgggggagcagatgtaagccccgtatgtgcctctcgccatcagggccatacacatgaggaggagaaggacaagtatccgggaccacccgcacccccacatcaggagaccagagacggagatgtataaaaaagctacttttattaaacagcattctcaccacacgttaatactgtcacgggaaatcactatgtacaagagtccatgtctctttccagtttctcacttactgagatttgttcctcaggtcctggatggctgcctcgatggccaggctcagggtgtccaggtcttcgggaggggtctcggtgggcttctcaaactgccccacggcgtaggccttcgcggccgtctcgtagataggcagcatgaacccaccctggttggtggagaagatgcgcaccatgacctgtttgggaaacttttgcatcaggggcaggcacaggttgagagcgcccaacaggtccacgggggtggcagcgtggataatcatgttgcggtaatcagaagagcgggggcacaattggtgggtgtgcagttctttgaggttccacacggccttgacaccgtcgttacaagcatcggccgtgcgctgcgccacatcaggagggtgtgtcacaggcatagtgtgctccatgaggaagggagtggagagggccaggttgcacatgctacccaggcgacaccgtacctgatccacctcattcttcacttcatgattgcgggtgtagatgatctgaatgcccttgttgttcacctgcatggttttgcaaactttgatggcctcttctaacacttggtgcatactagggatcatgaatggcagattcttgtactcaagagaacgattggtgtgacggaacatgcggctcacctcgtcaatcttgacgcgaccccgccgagtctgcacgttgggtgtgcagaagggggtgttcttatctttcatgatattgcgcaccttctcgttgtccaactcggagatgcgtttgctcttcttcttgcgaggtccggtgctcgccccgccgctgctctgatggccgcagctcagcagagaggaggaggccgcgccaccaaaaccgccgcgcccatggtggctcgaggtcacggatgctcctccgccactgctgcatttcatctcctcggactcactctccgagtccgaagccgaactgcaggaggaggaagacgaagaggaactatcttcatcgggccggcccaaaggatcgggaagaggagggtggttcatctgggagagcgggtgcgtgggagaggtcactcgcggcgtgccgctgccggtggaaggggaagacgcggtagcaccgcgggtctcgacttcttcaccctgttcttcctcgctatcagagatcacgatacagccggcggtatcgataatcttgttgcggtactggatggtaaagtcgggctcgggcttgatgtcttcctgtttgatgaggggcagcatgataggcgcgggaggcacgggcggtttaataatcaccttgaaaggacgcgtggttttgcgcggtttcttacgcgggctgagctcgggagtagcggatgccccggggagaggagtgttagtaaccgcgacgctggtgggggtcggcttgttaagaggggcgctgctaacgctgcaagagtgggttgtcagcgtggggccggtgctactggaatcgataccggcatgattgacagcctgggcgaggatgtcacctgatggtgataagaagacacgggagacttagtacggtttcacaggcgtgacacgtttattgagtaggattacagagtataacatagagtataatatagagtatacaatagtgacgtgggatccataacagtaactgatatatatacaatagtttactggtcagccttgcttctagtcaccatagggtgggtgctcttgcctccagaggcggtgggttcctcagcaccatcctcctcttcctctgaggcaacttcctctatctcagacactggctcagacttgacagacacagtgtcctcccgctcctcctgagcaccctcctcctgttcctcatcactctgttcactttcttcctgatcactgttctcagccacaattactgaggacagagggatagtcgcgggtacaggggactctggaggtgacaccagagaatcagaggagctggcaccagcggtggccaaagtgtaggctacaatagcctcttcctcatctgactcctcggcgatggcccgtaggtcatccacactaggagagcagactctcaaaggatcggcccccagaatgtactgggcaaagaccttcatgcagatctcctcaatgcggcgcttcattacactgataacctcaggcttggttatcagaggccgcttggccagcatcacactagtctcctctaagacatagcagcacagcacccgacagaactcacttaagagagagatgcccccgtacatggtcatcatacaagcgtcactagtgaccttgtactcattacacattgtttccacacatgtagtgaggatatccataaatatgtgatcaatgtgcgtgagcaccttgtctctctcctcatccaaaatcttaaagattttctgggcataagacataatctcatcaggagagcactgaggcaagttctgcaatgccgccatggcctgactgcagccattggtggtcttagggaaggctgagttcttggtaaagaactctatattcctgtagcacatatacatcatctttctcctaagttcatcctttttagcacgggccttagcctgcagtgcaccccccaacttgttagcggcgcccttgctcacatcatgcagctccttaatacaagccatccacatctcccgcttatcctcaggtacaatgtagttctcatacatgctctgcatagttagcccaatacacttcatgtcctcgaaaggctcatgaaccttatctaagatatctaaggcattctgcaaacatcctcccatcatattaaaggcgccagtgaatttttcttccgtctgggtatattttttcagcatgtgctccttgattctatgccgcaccatgtccactcgaaccttaatctgtttgactgtagaggaggataacaacacatataagtatccgtcctcctgactcatttatcgctatctcgatgccccgctcacatgcaagagttaatcttcactctatctgacatacacaagtaaatccacgtcccatgcaggttagtatatatcacatacatgtcaacagacttaccgagttctgtcaggacatctttttcggggttctcgttgcaatcctcggtcacttgttcaaaggttttgagggattcttcggccaattctgggaacagcgggtctcccaggctcagctgactgttaacctccttccttaacatagtctgcaggaacgtcgtggccttggtcacgggtgtctcgggcctaaacacatgataaacaaagtcataagcacatggatcacatacaggaaatatgtatataacattaaagatataactttttattaaaaaaaggggaacacaagtcccgacacgtaccgtggcaccttggaggaagggccctcgtcaggattatcagggtccatctttctcttggcagaggactccatcgtgtcaaggacggtgactgcagaaaggatccatggaaaggaacagtctgttagtctgtcagctattatgtctggtggcgcgcgcggcagcaacgagtactgctcagactacactgccctccaccgttaacagcaccgcaacaggagttacctctgactctcaacagaacacaactcagctgcctgcttcttctgctgctgccttaagtcttccatctgcgtcagcggtgcaagcccattccccgagctcattttcagacacataccctaccgccacggccttgtgcggcacactggtggtggtgggcatcgtgctgtgcctaagtctggcctccactgttaggagcaaggagctgccgagcgaccatgagccgctggaggcatgggagcagggctcggatgtggaagctccgccgctaccggagaagagcccatgtccggaacacgtacccgagattcgcgtggagatcccacgctatgtttaataaaaactgcgggtactggggacggtgttgttgtatatgtgaatttgtaaataataaatgggaccccatcctgtaaaaatacagagtccgtgtcagtctctgaaggacagagtattggcatatagccaataaagagagttgtggcaaagagccatgttatggattagtaatggaaagtatcgccaccaatagaggagtggtcaataatggtcaataacccacacctataggctaagctataccatcacctatagcataaggaagcgggggtgtatagaccccaagccaaaaacagtatagcatgcataagaagccaagggggtgggcctatagagtctataggcggtacttacgtcactcttggcacggggaatccgcgttccaatgcaccgttcccggccgcggaggctggatcggtcccggtgtcttctatggaggtcaaaacagcgtggatggcgtctccaggcgatctgacggttcactaaacgagctctgcttatatagacctcccatagtaaacgcctaccgcccatttgcgtcaatggggcggagttattacgacattttggaaagtcccgttgaatttggtgccaaaacaaactcccattgacgtcaatggggtggagacttggaaatccccgtgagtcaaaccgctatccacgcccattgatgtactgccaaaaccgcatcaccatggtaatagcgatgactaatacgtagatgtactgccaagtaggaaagtcccgtaaggtcatgtactgggcataatgccaggcgggccatttaccgtcattgacgtcaatagggggcgtacttggcatatgatacacttgatgtactgccaagtgggcagtttaccgtaaatactccacccattgacgtcaatggaaagtccctattggcgttactatgggaacatacgtcattattgacgtcaatgggcgggggtcgttgggcggtcagccaggcgggccatttaccgtaagttatgtaacgcggaactccatatatgggctatgaactaatgaccccgtaattgattactattaataactagtcaataatcaatgtcaacatggcggtcatattggacatgagccaatataaatgtacatattatgatatagatacaacgtatgcaatggccattagccaatattgatttatgctatataaccaatgactaatatggctaatggccaatattgattcaatgtatatatatcgatatgcattggccatgtgccaacttggtatcgcctctatcggcgatatggcctcatatcgtctgtcacctatatcgaaactgcgatatttgcgacacacagaatcgcccaagtcgccaaagtcgtctatcgccatcccccgtaaacgatataagcgttatcgccagatatcgcatatgcccaaaaatcactttttaaaaaatggcgatatcagttacacagaaactcacatcggcgacattttcaatatgccatattttcaaatatcgattcttccaatatcgccatctctatcggcgataaacaccactatcgcgcgacatgaatttagtcggcgacagaaatctcgaaacgcgtatttcggacaaacacacattttattattcactgcagcatatagcccattttagcgcggcacacatccagccgtttgtgtttcttaacgctctccaggtactgatccaggcccacgatccgggttatcttgtcgtattccagattgatccatcaatagggaacgctgccagcggcgcccagcaggtactgcgccttgtcgtttactttgccgcagcgtattcgcccgtcagcttcgaggtataacctacaacacggaggggaaggggggtacaaaacgtgaaattagacttttttttttaatgatgttttgtccctctctgtcttactctcccataggctgtaaggccctcaggaagagacttacggattgtagttgcagctcgtcagtttgttgtgtacgacctggcgtgtcaatgaatgggtcatggtggtgacgatcccgcgaatctcagccgttttctcgggactgtagcagacttcgccgtccggacaccgcagcctgtggattcatgaaaatctactctggcattcccgaggatcgtcgatggaacatggctatcagaaacgtcgagagacagatccagacgcaccacagaacgcagacaatcatgaaaatacgtacgcgacggtgaagcgattgcacattttgaaatcgtaacagcgttccggcgggtggttgacgtttatgaattcgcaacattcttctgcgcgcacccgcggcacgcggctgtgacccaatagcagccacaacgccgtcaagaacggcgtcagatctttgggactcatgacgcgcggttttcaaaattccctgcgcgcgcgacgggctcaaacgatgagattgggatgggtgcagaaggtgtaagtctggttattggcctcggtgaacgtcaatcgcacctgaaaagacacgctgtagtcccggaagacgtgagcccagctctccagcttcatcacacacatctgataacgtgtgccatcgttgacgacgaagcgtagcagcttggtctgcttgggcaccatgtgcgctccaaaaatcttggcgtcttccacgctgatctgcacgtttccgtcgctcggtttcgaagccgttcggggcatccgttggaggatggtttggttccgaccgctcaggtaccagatcacctttttcacccaggtggagcttctctccaccaaggtctggccttcccggttgtacagcagatacagggtctcgttgcgacactcgggacccgttgatacccgctggaaccccgagaattgcaagggggatcgtgggggcgagggatagagaaaaggacagtaaaacgtcgccgcgtcatgcggtttggaatacgtcagtttagaccatggcggggacggattctggtttgctgttagcgtcgaccacggagacgccagacagggcgttgcccaaaccgcgcacagaagcaggcagtgaaagtggtgacgaagcagaagccgcagcatattatttcccgtgacgcaggctagttggcaaagagccgcacgctgaactcgaggctccgggcgtgtggcgccagcgaaccggcggcgttgaacgtggtccttttgttggtgccgccgcgacggttctgacgtctaaagtcgctgatgagcaacgacacctcggtcacgttgattctgcaagcacaggttccgaacgtcatttcataccccatgcggttacttacccgttacccgttcgcccttaccttcccgttgtcatgcatctttagcgcgtaccctcacctcttgagcacgtcaaagttgtccaagccgtggctcgcatcgtagtggtagttcaacgtgaggtccacgagctgttccacatacttgtaacgggtttggtcgggcagcgcgcgagagcacgcgtcccagtaatgcggtactcggtaataatcgtttttttccgcggtttcccgctggcactgacccagcaccacggcgcacagacaaacagacagccacacccgacacagccgcatgttgcagactgagaaagaaagctttattatgagacatcatacacatagtataggcgaggtgatggggcggggaaagagttggaaccgaaagacaaaaaaaaaagcctagtcgtactcgggatctctgagcgagacgggttgcatggcaactttcattagtttgggaatctgccagctggtgctgttcgaaggttcttccatttccgaggcggtcagttcatcgtacaccgaaacgtagtacctgatggggtcctcctcattgtccgagaggtgagattcgatggtcaaaggcgagcctctcccataattgggattcacgaacgacgtgtccaagttgccatcctttctgaaatagatgacgttctcaggatcatgtttcatgcgctcgcgggccgcggacgcctcctcctcctcgtcccagtcccgagtttccaaccgctgataagggctcgaggaacaaaatccggcggggatctgagaacctcgtcgggaaccgctgccaaacgggctgctgccgccactgtcgtccgtgtcgtccaacaggttgacggcttcttcgtcggcgaaacgaaagcgacccgggtgcttgcaacacgaggagtaaactaccgcgaccagtaccgctatgaagctgaaaatggaggtgcctgtcacgatgtagaagaggatagccagcactttcatgatctcgttattgcgcacgttgtgaacggaagactcgtgggtggtggtcatgttgatcccggtcgtgggtccgctactcgtggcgttgtcgacgctatttctgttgctggtgctagtagggacttttgtgctgctggtcacattcgtaacgtcgctgaggtctatctgaagcagcaacccgaacgcgaccagggccaggaatgttgcgcgaaggggaccccgcggggccggcattctcgagacgtggcgacgtggatttcttgctatgtccgcgaacgacgtgtgacgaggacgtggtttccgcaagcctctaccgacgccgcgacaccaggtaggttatcaaaacgcgagcccatatcgccgccatcattgtaatcagcaatgtgttgaggtactgcacgatgaatctgtctagtgacaccagccaaccctctgcttttgcgggcaagcgcgctttcggtgacagggtgtatcgtacgtagccacgggtcaggcgcgcgttgtagcggtacacgcagaaatctatccacaagccaacgcccggttgtagcttcggatggtggataatagcgcggtgacgtacgccgcggggctttagaatctccacctgtaaggccatctcctccaggtagtgggtctgactgcgacgcagcgtccagttcatgtaaaagtcggtctcgccgtgtccggccacgaagaggctgcttactaaatcgggcgccagagctaggtcaggcgtatcaaattccactgtcaggcgacctgattctaacggttccacgatccgggagagcgtttctagatatagagcaaagcgtaccacgtctacctgcggtgtaaaaaactgttgtgggcgttcaccgtcgttgaccacgtaggccacgtagaggccaacattttccaccacgggttctagctgcaggcggcacgtaaagcttagaaacgacggctgtacggtttggttcccgtgaagctgaagcgtcacttccttgccggggctcaccgtgctgtaacgccgcaccgagtcggtcatctgctccagatcggtagaccagaagggcgtgcaatgcatactgtcccagtcgcgacacgcagcccagcctagctcggtgaagggtcgacgcacacccgagaaagtgtgcttgaagaccagggggtcgcctcggtagctcagtagtcgaacatgcacatagtcgcggctagcgtcgacagacggtccgtagagggccagcagtacgagcgtgaacagcaagcgcaacatgctgcgcgggttaggaaatgcggcgtgccggccaccgcccgactcataaacgctaccagcatgacgtctcagatcacacaagtgacgaggagcgtaccgcaaatcactagggaaaaggccagcagagcccgatagtcttgctcttcgcgaacgatctcgtccggttcctcgcaatcttcgtggtccacagaagatgaggagcaggaattttcgttaatctctgcgaggatactagtgctgtaccacaccagagcgcttagtgtgcccagagctaccgcacggtaaaatagggacatgatcaccagcgcagtctaaagtagtggtaattcagtttcttggcgtatttccagagaaaggctttgtaggccgtagggactggccaggcaccgaactcaatatttgtagacactacgtcgtaaatgcgttgttcctcgtctaagactaaccgaaaaaatagccggttgatgtgacgacgcacggcttgcgcgttaggattgagacacttggtgcccttgtcctttaaaatagccagcacttcctgacgattgcagctttcgctcgctgcgattggcttaagcaattcggttccgaccggcagggtattcaacagaatttggttattacagcgacaccgcttgtcgtaatcttctagttctaaaagacggacggctatgggacatatggcaagtaacatatatgcggtcaatgacaggtatcgtaccgataaaagtttaatgcgcgaattcagaatcggatgatgtaaccatgttagcaacatattgaaaacatgatattttctgctctaacaaacttgtctgtttaaaatatatactaaatattattccttcagacctactagggttacagttatttttcccggccctcgttccggttgtcttgttacattaacattataccacctgttatcgttgcgtttgtctagccattttgaaaaagggtgatggggcgataaacatactccaggtccatgtttttttcctccgcctagatacaagaaatattcattgttattgcatctgggaccaccagattcgcgatgaaaccaaaaattacccaacataattgttttgggcggcagttttttaccatcaagacatttgcagcgtaattccgttccatgcacttcataataatacatatacgttaaagaaataatcaacgcaccaaaaattaatcgcattataattttattatttacgtcactaccaataattcgtaatatccggtattcccggaaaatcactcaaaactgcgtccatgacacatcaattcccgataagtacccccctttgaaatcggatccccccacataccaatcaatcatacaacacacaggtttaaaaatcgatcacacgtcaattaggtttcaaaatcgataccatttattatcaggaatctagactaattctacaatgacagctctgaatttctctctcgtctttcttgtcaggttctcatcatcaatcttcacttccacccatcggggagtcatcgtcgctccaaaaccctttggggtcactggttggaaaagtctctgacacgatccaggcaccccgtacccagtccgactgatctagcctacggagcatctcaacaggcatgagctgcagggccacggctgtcacggcactgtatcgatgtaacactagggactttctttgcgatgtagccatcaacacggcgtatgccccatagttcgcgtgatacgacgcatgatgggttaaacgttcccatccggcagtgccgtctcgggtccgtgcacacaacagctgcacagcgttatgatgcttaaaattaaccataacgctgggactactgatgaaggagtagtaatgagccaggacgccgtacatcgaaggcaacaagaaagagtgacagcacgatagcaccgggctcttatgtaggcgacagcttatttttcctgacgtcggcaaaaagtacctaaattccccacagatattcagacacggttccgtaaagtgcttctttttttagtgcaggaattggaaaaaataataaaaaatatgaacagctcatctgtaattatctgtgtgacttcatcgtaccgtgatgtaaaaacaacaacaggaagcttacagggtgcggtagaaaattttgccgattgagcaacactgttggcatctctcactccgataggcggctataagatagagaattaaaagtatgatacccacaagaaagataaagagagacaaccaggctagagtatgacgaccgctttttccttgtttgacggttatatgtgcggtatgattttgctgtcgttgcttgtgatgttggacgcctggagtggaaaagtacgtatggttcttaggcgcgcatacggtattattggtggaagtgcagttacgaatcatgacttgagtgacgttacattgagtgcaatcggtacagttgtaaagtcccgatacatacgtgccgttggggcaaggggtacacgttacgctggtacgctccgtgcatactttagtaactctttgtcccaaaccacacggaggacagcattcgttgcccagttgcacttcattatgctgacacactttagtcaccccaagctgcaataatatcacaccgaagcagatgagcatcaccagaggcttcatgcctcctaccggaagaataaaaataactcatggggccgaacggtgtcatcctctccgcggtttgtaatacgagatcgtaaacgtaaataaatgacataacttcactaacccgcatactacaaagtccacctacgacgctgaaagtttttccaggacagaacaggatagtcagccatcttcacagtctacctcttaggccgtatctaggagcataggtaatcagtttgcagccacagtacagcgagcccaagagaccgcacacggtccctgctgggaacacgtaccaccacatcgattcgtcgtgccgtataatcgtagagttttccgaacttttatacacgccggtggcgttagggccgtgtgtgctgctgtgattggacgttttgtgagctaggtaacagctgtgatttcacctgtcgccaagactgacagcgattacccaggtggagcacaatcacatagctgatagacgttaattgatccgttgattcccatggacattttaacggtaacaatacagctcccgttaaacattagattaatagacgttagtggataacagcatgttattcgcccgtgatcgtggttatgcactttcttgttttttgctcatatgctgtaaggtgttcgagaatcgtggggagtatatgtgttgaatcagagtcatctttactgaccgcgccatacttcgtatacgaacttaaccggcgtaaagtgtttcccgatatataaaccggcgcctattgtagctgtagcgcccataggtatggcatatacccacggtgatgttgtgttattcgttttttgtgataaaacgtagcttatgtttagtgtgtgttccgtcacgttatgtgtgtcgttaaaagacggcgtctgtacagtatggctttgagttgtatctttaattgttattgcatttggaggtgttgtgtacagagttgttattgcgtgttcaggtgttacgttttgaggtacagctgtggtgtacacgggctccaaggtgtagttacggagtctttctatgcaggtagtgttgagatatttgtgaatgctggttatgttcgattctgtgaggttaaagtgtgtactatttatggcggtgtaatttagacggtcttgccatcctgaggatgttagtgttaggtaattcgtgttgttcacgtttgcttgatatgtataagtaggtgtactgtttgtgaggtcgcaagtgtgattctcttgcagagattttatccatcttgtgtgaaaatattgagatacgcgatgaatgttttcgctatctatattgtaaagcgtttcggtggtacttaggggttgtttgctgtaactcttattttggacccagggtgtgaaccatgactccaatgtttgtatagtaaggtgtcctattaataaagacgaactgattcctaccgtaatgttatatcgcacacctagggtgccgtttacaaacacggaaatgtttccgttacaaaccacgttggcagatgaattagattccaggtggtaacgataggataatgaccgttcgctcccaacggatgacacaaagtatccgaataaccaacacgcccattcaatccgcatattttaatcacactattcacatttcacacactgcattttttaacatcttatttttttattttatgcgtgttctcacctcttcatctttttaacaccggggtaactatcgtaagtcggtaggcgtcgatagccctcaccgcctcgtcgtccccttcccggcgtggggcaccagcgtccacagcactgcaggtaacacaggtagcataggaaacatacggtgaaaatactccaaaatcccaaaaatgccgcgattccccgagtggcccagggagacatcccggtgtctatgtcggccggcggtgctggcgtcaccggtaaaaatttcggcgggtgtggctgcgaacggtagcagtcgccggggagccggtaacgctgtatcactgtccaacagcggtcgggttcctcgtccggacatgcgggtttccagcaatcctcggcgtcggcgcggccgatatagaagtagttgcgttgaaaaccgcggtacatcccgcagtcgtgattccgtagacgccagggcgtcggcgaccagatctggtctcccagcgagtagcgacctaacgccggcgtgcagcaaggttcgtcgggccggctgagcgtctccagttgcgtcagaattacgaagcgttgcatgatgaggccgtggctatagttgcgcagcacgcattcgtacatgccggccgtgtccgtcgatacgttgaaagtcagcgagaatatttggccgagatgcaactgcgagaaattccaagtggcgtacggcaggcggtattgaagtccattcatcagcctatggcctttgacggcgtccaggatgagctcgtcgctgccgtcgtgggaacgacagaaacgtgcgcgaatggaaaccatgggccaggagtgtgtcatgaccgtgcaggggatggtaacttgctctccctcggcgaccaacaccggcgccggcgacgtggtctcatagttctcggcccacatcttttcggcgatgtcagcggtggcgaaggggaacgaagaggaagaatattcgaggagtcgcgggcagctcaacagcacccagaacagccacggcagagttcggagcgactcccggcggcacatgatgattcttttcttccctttttcgcagagacgctgcccgcctgttcctgctccgtgtgtcggccgctcaaacgtcgggccggcgtggtggtgaccaccgtgcgacgcagcttctcgcccgggatgcccgcaactgagcgtccggtttttttacaggtcttttttgctgcctctccctcgccgtcgcggccgacgtggtggaccagcaccgcgcaggaactctcgcgtcgccggcggtacgcgacctgtctcattgctacctcggatgtttaagaaggaacgtttatctgcgtcacagggtctgatgaagctgccaagagtcgtggctgtggcgtagcgcgttttgtacagcgcgtttcaccgctttctgcatggccgctaccacatcgggtgggagcggctccggcggaagctcgatgagcagttgctgcgaatctcggcgttcggtgtccgccgtttcgtcggacgtggcgtaaaaaaccgaggtggtcgcccagtcgtccacgctgtcgacggcttctgtcagtgccgggttgtcaaaaccgccatcggacgcgggtgataaaagaacgtacgatgacacgctgttagtacgactctcgtcgtcgctttgggaacgacgtgatggacgacggtagatgacctcgtcttgccacgcgtcgaagcggtcgcagcagcgctggatccaagcgcagcgaagcagcttacggaacacgtcgttgttccaaaagtagagcataaagagaaagaaaagtagcgtaacgatgaagccgaaaacgacgagggtcggcagggcactaccgccgctgccgttttttgcgccgtgcgggtgcacggtggtagtgccgttagtctgagcgggggtcatgacaagtctgaagagatgagagcgcgggtgctcatcaggaacagttgaggtgtctccctaccgaagccttagcctctacggtgttttatgatcaacgtgtctacgaacgtcattgtgaaagtgacgtctcaggctttccgaaaccgcgtcaagttcaacgttggtttcggtttagcctgcgtcaccgaggcggaggtggaaatgagccgtcctgtgggggagtgtacgaccctgtagtgcccatgggtaacgttgcatcggaagaagtgaatgcggcattggtgtacgcgtgagtggctttgctctctgactcggaggagttgccgcagcagctgcagactttacgtactagccaaaaacagcaaaggcagcaagtaaatatgagaaggagtccagataatgtccagccgctagcggcaagtagcgcgagctgtggcgcccccaaatcactgccgttagaagcattaatacatgctgtcgatggtgtagtcgtgttagtggtaccagcagaagtagattgactggaattagagctggtacctgtagtggtttcactcgccgatgcggcaagtgcaaataaaactaatatccacagcatgttcgttactatataattgatatacgaacccctttgtcgtgacaatcagcgttatatacgctgtatcggcatcgttttaccggaaagtttatcgtaatgtaacccgcgttgtgtacattcgtactgaaagggaacccccggtgatgtgcacattatactctttcattctggggtttcccaatgacgtaaaaatttccactacacaataaaattactgactcatgtgaaaagtgtgctttttattaacagagcagagggtttacagtagatatatgtttgccagggccaccgttttctaacaccgatcaccgccaccattaccacccgttgaactccacacccgggagccgcctgatcgccagggactcctcaccgtccatcgtccgaacaagctcccgtcaccgatgctgccaccatcaccgagagaaagaaccgcttgctgcagatacgcttgggctcgcctccgtgcggacgccgtttcgtgcagacgctgagtagatcgagcagagaatgtcaaaacgacattaccgcgatccgctcccctcttttttctttttctcattcacgtgtattcttgatgataatgtaccatggctacggtggtgaactgcgtcgcggatcccgtcacgggtttcaacagatcgacgtcggtcagcggcgccgtcaccgccatgtccggcggaggcacgctgtttctctggttagcgacgtggaccgacgacgaagacgatgaacccgcgcggcggtctgttatccgcgacgacgcgtagctgcactgggaagacacttcctcccaacggaccaagatctcatcgggtcgttcggagaaacggtatcgtctgtccgactcccgccgtacggcgccgaggcccagcgacgacaggtccgcgaaccggcgctcgtattccccgtacagctcgcaacagcggatcagccagcggtagctcaaaaacatgcgcaccagtttgaaggtgtcgtgccaatggtaagctagatagcagagaatggccacgatcagcacgagcatcacgccgatgatgggtaacccgacgttcagcggcagatcgtccatggtgaccgtcctctgtccggatctacgtcccagtctctctcttttgtacagcactcgcgcgggaacggccccctcaaccctcttacgtagcgggagatacggcgttctcccgcgggccacttacttgcacggtcgcttgaacggcggcttggaccgccacatgtaccgcatccatccattctggcagcagcgcgttcgacgacgtcgtacgagtcgcggatgatgttaccccgccagcacctccgccggcaaccgcgtcgtcgttgctatcgtcgccggtttcgggcgatgacagcgccggcggcgcgggtctcgtctcgtccaccatttccaccgtgtcgaagcgacagccgctgccgtagtacatggccccgttcaacggccggcgggccgggtcgccgagttccgggtcgggcacatccatggctcgccgtctgcttctctgccgctcgtggtgccgacggcacttctcaggataatgacagccgcaaaatagatcgtggagcatgtctcgccaactgtcctggtggtaatatcttaagtacgcgatgagcgcgccgatggccataatcataagcgtaagcaaaacggcacagataacgtgaaacaccgcggtcatccaagtcgggcggcgtcggggacgcggtgggtcggtttctcttacgccggcgtcactcagccaccacacccgtagtcgacattcccagaaccggtgaatgcgactcaggacctttcgacgccgccatttatttccaacgtccaagtcccacgtcatttctggcatctccacgcccttgactgacatactctctttctctctcttagctgcggtgaaaaagagggaaggcgtgtgctgctatacaactgtacaacggacgcgctcgctgtttcggtctcaggtcatctgcattgactcggcgtccttcatgacgctctgcaccgccttttccaagagttcctcgatgtccgaccatcgaggaggcggggctaactcggaaaccgacacgataggcagcgtggtcggctccgtcggcgtgcggggtcggggacagggacacgagagtcccaccttcgagagattctccagcccgacggtgcgcggcagtctcggattccgcggtggcttttgtggcgtcggcgttttcgggaagggcctgggcgtcaccggcggtgtccagccgaccggcttgggtttcgtgggcggcggtgttttcttggtgggcggcgtgctcaggttcttacgcggcgcgggtatcggcgtcgggggcctgtgcgacgacagccgcgtggtgggggcccggaccggcggcgtaggcggccgcttcttgcgcccgggcggcggaggtggcttccaggatggcggcggctgatgcagtaccgtgtcgacgctggccgaggacgacaaagagctcgacgaggagcaatgcgacggagatcggccgatgctggtcggcgttcccggcgtggatacgtcggggatctcgaatcgcgccggaggaaactcgggtttatctatcggcagaccatcctctcctatgtagagcgacgtacaccgcggcacctgcggcgtcggcgggtgggtggccacccgcatgagccccagttccagatccagcggctcaacgacgtcttctttcggaattcgatagcagcacgcgcaggcaccacgcttatcagaagcagcacccgggagccggcctcgcgacgaagtctcgtcggatcgcttgcggcctcggcgctgggtaaataaggaaatggccaggaccagggaagccagtccggtaccgccgaggagcccgacgccgagccacagccacaccatgatcttctctcctgcttggaatctcaaactccgtgtcgggaagggccggtgtacggacatttatgccttggatttctggaaacgtcattttttggcaaggaatgtgtttattgtccaaacactgaggaaggagatgtgagccaagtcggaaaattccttatcacaccgggggcgggttacgttccggtctgatgctgctgctgttgttgtagagccgcggccatggccgcctgcacggcagcttgtaccgcctcggccacgccgggtggcatctgcggcatggcggggggagacgcgtcgggcggaccgccgggcatcgccgtcggctgcgacggtggttgtgaactcaccgtcggctcgcacggaggtttgttcttcggtctacccttcggtttgtctttcgccctacctttcttcggtttgggttccgatgtcggtgttggcggttgcggtgggatgacgggctggtgggactcctccgacggcggggggacgaacaccgtcggcgccgaaaccgggggactctcgactatctcgcagatcaccctgtcaggatcgtcgccgtgtccgggacgccgtcgatgaccgtattggaccatgtcgtaaatcatcgtctccttgtaacacgctgaacagcagcggctacaggggcccgagatgcatttgcagctgcacttacagctgcagctgcagtagcgaacccatcggcaggtaaggaggtcgattacggagtctttgaagaattcccggtaacggatgagatacgcgcagaggaaaatcatgaaaacagaacagccgactacggctgcgatgccgggtcccgaagagacatccgccgacgatcccgccaaacaccaaattcctaaagccgcgcatgttatccaggccacaataatcgtgggaacgccccattggcattgccacgaaggatcgtgcacgtcgcaacccattgctactgcgttctcccacaaacgccatcgcactatttatctctacagcggctgccgagtcacgtccgccggcgcccatcggccgcggcgatctcctagtaacactcgtccgacacttccaccatctccagctcggccggcggttcggcgtcctccaccagcggcgtcgtctcatctttgccacagcagcggacgcacaccttctccaggcagaacgccaccagctgccgccgaacgtaccacaggtacacgtgcagacctgcgaacaggactacggaggtcatgaccaccacgacacacacgggaatccagggatcaaaattgctatcggaactcatggctatcgccgccgacgtgcgcgcgtgtgtctcaccgccgctcgcccgttgtcgcgcggcttgttatacgctagcccgtcgccgcctcggggcacggtgccctcctacccacgtaacttcctccgtgacttaaagtcgcgtgtggtagatctcctgctccgtggacgaaccgtccggcaggatagcggttaaggattcggtgctaaggccgtgtcgccaacgtcgaatgctacgttgcaacagcttcgacggacggccatcctccctctcatcgcaataataaaacaccagcagcgcgcacgacgcgatcacggtaacccccatgactagacccacgcagatagccagccccgctagcgtatccagcgccatcccgttcgctcccgtcgtcgtctcctgaacaaagcaacaactccgcagtccccgttttcaaccgtttttgtttccttctccgcgagcaaatgttaactcccgcggtctttccggccgtgctctacctcctggcgcttgtcgtctgggttgagatgttctgcctcgtcgccgtagccgtcgtcgagcgcgagatcgcctgggcgctgctgttgcggatgctggtcgttggcctgatggtggaagtcggcgccgccgccgcttggaccttcgtgcgttgtctcgcctatcagcgttccttccccgtgcttacagccttcccctgaaacccacgttaaccgaccgtcccgaaaacgccggtgttaacacaggaaaaaaagaaaccacgcaggaaccgcgcaggaaccacgcggaacatgggacactatctggaaatcctgttcaacgtcatcgtcttcactctgctgctcggcgtcatggtcagtatcgtcgcttggtacttcacgtgaaccaccgtcgtcccggtttaaaaaccatcatcgacggccgttataaagccacccggacacgcgccgcggcacttgcctacggcgctgctccagggaaactcctcttccttctgctcttcctccttcaccgcagggatcgtttccctcggccagggacataccgaagcaactaccggaacaacctggaggagtcgcggcatgacggcgcccaagtgtgtcaccaccacgacctatctggtcaagaccaaggagcagccctggtggcccgacaacgccatcaggagatggtggatcagcgttgccatcgtcatcttcatcggagtctgtctggtggccctgatgtactttacgcagcagcaggcacgcaacgggagcggcagcggctagacaagtcccaggcggctacagctccaagcgccgtagccggcccgcctgccgatcgcgacgtcgtggaccatcgaacagagagtcacgcgtacgagaccccgaggtacgccacgcggtgcctaacgcggtataccacacccgtacggtctgcagtgcggcgtacaacgtgtggaaaacgcgttgcgtcgcagagtccgccacgtccctgtcttgtcgctccccaatcgtctcccgcacaccccccgcggcacccagagggcgggtgaggcaagtattcttaaggccgttctccgttccatagcccataaattgttgattccggagctcgttggcgcggaaatagccggataaggggagcaacaaccgtcggcgaaagccgtcccggtcattcagtccgggtttcgcgtccagtcggacgtgtgaccgttgggcaacggaacggcgtttcactgccaaaattgtatcgggtagtgtacgagacgtcggcggtgcagaatgcgactcgcggcgtagctcgccgtcgctatgcggctcgtcgccgtgtggcgcggcctggccggctgtctgcgcccagatctgttggccttttggttcctctggctgctgctgcgtgtgtgctttggcagacgcggtggcagtttgcggtctgcggtaagtgaggatgttgccgagcaagcgcacttgcggcgcgtgatcggcacgcgtgttattgtaggttcgttgccagatggcaagtgctgtcaacagcagacgttgtgggcggtcggtgtatttttgtgggttgcggtgagagtcggcactcggtgttttgtgagtgatctcaacagtttgtgttgcttttagcagcgtccaaaacagcgacgcgactttggggatggcctcgtgctcaccgccgcggagagtgtcgccggacctgctcgtcagcagcgagctacgcagacggaatatctggaggagagttacgtgtgtcacaggagagcgcgggtctccggcggtaacgacggcggtgtcgtcgacacgtgtgcggcctgctgtgctctgcggaaaagcgccggtctcggagaccgtggacgaaaaagagaacggagcagctaccgctggcggcggcggcgttaatgctgccgttgatgttagacgttgtgagtactcggaaacagcggtgaggcagaagctcgatccttcagggaacgacagtcgatgtgtggtagccgcagcaggtgaggttggggcggataacgtgttgcggatcgtggcgagaacgtcgtcctccccttcttcaccgccccacccaccctcggttggtgtttcttttttcttgtgtcctgcagatagttccacggacagcgacggcaagtccataatcgccggtgtgcaagtggtggaccacgacgaagatatcatcgcgccgcagagtttgtggtgcacggcgttcaaggaagccctctgggatgtggctctgttggaagtgccgcgttgggcgtggcagggctggaagaggtggcgcaacagcgagtctgggcgtcgatggagtgctgggtctgcgtcggcttccagcttgtctgacttggcgggcgaggccgttggagaattggtgggatcggtcgtcgcgtacgtgatccttgaacgtctgtggttggcagccaggggctgggtgtgcgaaaccggtgtggaagccgaggaggctatggcgcggcggcgacagcgcatgctgtggcgtatgttctctcgtggaggcgacggcgaatgcagcagacggtgttcgatggagatggcgtgcgaggaagaaagcgccgtgttgtgagcagacgacgttggatgcgggacgtcggagcacatgggccatgtgtggtggcagatggcggtgtccacttgtgcttgtcgcggcagtgcacagacgaagcaacatgtcgctgtgaagagatagagtgtgagcatagctgtatgcagcgttgcgtgtagaagcggggggatgaagacgttaataaagagtagcggcggttgtgatagggcgaccgctgaggcgagctgcgtgtgcgtgccgtctgtgttccccgtgtccgccgcgaaaggcccccgtccccgtccccgccgcaagagtcccccgtccccgccacgcaacagctcgccatcccgcaactccccgtccccgccgcgaaatgcccctgtccccgtcctcaccaccgtccccgccgcaagagtcccccgtccccggcacgcaacagcccgccatcccgcgacgccccgtccccgcacaccccccgtccccgcacaccccccgtccccgcacaccccccgtccccgcacaccccccgtccccggcgcaacccccgtccctgtccccagcgtaactcccgttaccggcgccggcgcccagcacgcccgaaaacaacgccgtcgccgccccgaaaagcgaagcgctgcgcaaaagctgcgtagaaacgccgcacaaacaccgtagaaacacccgccgccaacccccgagcgcccgcaacaccccgtccccggcgctggtccgcgaaaaaaaacaccgcgggacgccacgcaacggcagtgcgcacaaagcgccggacacagcacgccgcaaacgcgctgaggacgccgacgcgcttacttatgtcacgcaacactccctcagccctgtccagtgtcggactggcggaacgacaagtgctgtggagccacacgcaccggcagcgcgcagaaagcgccgtggacagcaagccgcagaagcggcggagcgcttgcggcgccataaaggcgcttagccctgtcccgcaccggcggcggtcggggtgtgtcgggggcgcggcggggtgggtgtgtgccgggtgtggcgggtgtgtcagggtgtgccgcgggtgtgtcgcgggcgtgtgccgggtgtgtcggggtgtgttggccgggtgtgtcgcgggcgtgtgccgggtgtgtcggggtgtgttggccgggtgtgtcgcgggcgtgtgccgggtgtgtcggcggggtgtgtcaggggtgtgtcggggtgtgttggcgggccgtgtctgcgtgtgtcctcgacgcgggttgtgcagtgtgccccggggcccgcgactcctcccttgcgcccgcgtcttgtctggccgttgttttgcgtgtgtccccaaggacccgcgctgccgtcccctggggactcaaacagacacagacgcgcgtctgcttttcgccgtgcgcgccgcacgtcgcttttattcgccgtcgccgtacccaccgcagcacacgcaactagtcgccgtcgccgtccacacacgcaactccaaatttcacccccccgcagaaaacacccccccgcccctcggggacccagcacacggcccggaatggatgtcgggcgtccacctaggagggtgcgcgctcggggacccagtccgcggccctgttgcgcgtgttcctccgggttcctgccttttccagtcgagtgcgtcgtcggctgccgggtggttttccacggccttccagactgcacggccccaaggcggcgccagcaagcgccatacacgtcgctgcctataaaagccaggtgcgtgtctgccgtggcacacggacgacggagccgtccgcgtgtgtaaacggcgtggtcgctgacgcgggtttgcttcctatatagtggacgtcggaggtgtccggcggccatggcccagcgcaacggcatgtcgccgcgccccccgcccctcggtcgcggccgcggggccggagggccttcgggggttggttcctctcctccttcttcttgtgtgccgatgggagcgacgtcaacagcgggcactggtgcgagtgctgcgcctacggcgacgccgggccacggcgtccaccgggtagaaccccgcgggccgccgggcgcccctccgagtagcggcaacaacagcaacttttggcacggcccggagcgcctgttgctgtctcagattccggtggagcgccaggcgctgacggagctggaataccaggccatgggcgccgtgtggcgcgcggcgtttctggccaacagcacgggccgcgccatgcgcaagtggtcgcagcgcgacgcgggcacgctgctgccgctcggacggccgtacggattctacgcgcgggtgacgccgcgcagccagatgaacggcgtgggcgcgacggacctgcgtcagctgtcgccgcgggacgcgtggatcgtgctggtggcgaccgtggtgcacgaggtggaccccgcggccgacccgacggtgggcgacaaggccggccatcccgagggtctgtgcgcgcaggacggactgtacctggcgctgggcgccgggttccgcgtgttcgtctacgacctggcgaacaacacgctgatcctagcggcgcgcgacgcggacgagtggtttcggcacggcgcgggcgaggtggtgcggctgtaccgctgcaaccggctgggcgtgggcaccccgcgcgcgacgctgctgcctcagccggcgctccgacagacgttgctgcgcgccgaggaggcgacggcgctcggacgggagctgcgccggcggtgggccggcacgacggtggcactacagacgccgggaaggcgactgcagccgatggtgctgctgggcgcgtggcaggagctggcgcagtacgagccgttcgcgtcggcgccgcaccccgcgtcgctgctgacggccgtgcgtcggcacctgaaccagcgtctgtgctgcggctggctggcgctgggcgcggtgctgcccgcgcggtggctgggttgcgcggcggggccggcgacggggacgacgtcgccgccagcggcgagcggcacggagacggaggccgccggcggggacgcgccgtgcgcgatggcaggagccgtggggtctgctgtgactatacctccgcagccgtacggaggcgccggcgggagcgcgatttgcgtgccaaacgcggacgcgcacgcggtggtcggggcggacgcgacggcggcggcagcggcagcagcggcggcgccgacggtgatggtgggtccgacggcgatggcgggtccggcggcgtcggggaccgtgccgcgcgccatgctggtggtggtgctggacgagctgggcgccgtgttcgggtactgcccgctggacgggcacgtgtacccgctggcggcggagctgtcgcactttctgcgcgcgggcgtgctgggcgcgctggcgctggggcgcgagtcggcgcccgccgccgaggccgcgcggcggctgctgcccgagctggaccgcgagcagtgggagcggccgcgctgggacgcgctgcacctgcacccgcgcgccgcgctgtgggcgcgcgagccgcacgggcagtgggagttcatgtttcgcgaacaacgcggtgaccccatacatgatcccgtcgcatttcgtctttcggacgctcgaactctcggtctcgacctcaccaccgtcatgacagagcgtcaaagtcaattgcccgaaaagtatatcggtttctatcagattaggaaacctccttggctcatggaacaacctccacccccatctcgccaaaccaaaccggacgctgcaacgatgcccccaccgctcagtgctcaggcaagcgtcagctatgcgctccgatacgatgatgagtcttggcgcccgctcagcacagttgacgaccacaaagcctggttggatctcgacgaatcacattgggtcctcggggacagccgacccgacgatataaaacaacgcagactgctgaaggccactcaacgacgaggcgccgaaatcgacagacccatgcctgtcgtgcctgaagaatgttacgaccaacgcttcactaccgaaggccaccaggtcatcccgttgtgcgcgtccgaacccgaggatgacgacgaagatcctacctacgacgaattgccgtcgcgcccaccccagaaacataagccgccagacaaacctccgcgcttatgcaaaacgggccccggcccacctccgctgccgccaaagcaacggcacggttccaccgacggaaaagtttctgcgccccgacagtcggagcatcataaaagacagacccgaccgccaagaccgccaccgcccaaattcggggatagaaccgcggcccatctctcgcaaaatatgcgagacatgtacctcgatatgtgtacatcttcgggccacaggccacggccgccagcacctccgcggccgaaaaaatgtcaaacacacgcccctcaccacgttcatcattgaaagtctctccagtccctatgttgtcaggacgtgctgtcgttcttcgcttgctgcgaagcccgttcttccgagtcgtgtcgctgcgtccagcgtcgcgcccaagatgggaatttgggtcttttcacgcgtagcctcctccaccacggctgctgatcgccgtcactaaggaccgacacggaggatgacgaggagcttctccccgactccgcggtccgcgaccggctacgtagcgcgtgtccctgccagtctccgcagttacaccacacgtcgtgagcagcgtgcacctgctgccgccactgggcctcggcgtgctcaggccacccgccggagcccggtctgagctccgacgcaggatgcgcgtactcaacgtgcgccttccagtccatacagcaacaccataggtcgtgtgagtcgtcggctacccgccgccaggccagttcccgcatgggaaggctggacacgccgaccgagaggtcaccgagcccggacgccatctcttcttcctctccgtcgctgtcattaagcagccaggtcacctcctccgctccgcggtccgccggtctcgacggaccgcgccgccgtcggcaacacggaaaacagcacgccagcccgagccgctaaggccgcatgcccctgccgcccaactgaacacgcataccccgctcaactgcgttttgccacccctgccagtgctctcgctcgagcaccaccccgtatctcccaacctttttccaataaacgaaaccgacatgacatacgtaatgggtgctcgtggctacatttattgaaacaaaccgcgatcccgggcgtcttagcacacgaaaaaccgcatccacatcatagacaagttacagtccacagtcacatacacgataaacaataccaacagggtaatgtttatggagtaaaacactattgtccaggccacatgcgtgtatgacttccgcaccatcccgtactgcatgttccacatgtacgcgctagacgtgtaatccactcgcagttcggggacgcaacgcagccagatcacatccccttgcagtaccagacgcagggctagcgtctcgaagatcggcatcacatctaagttccgcacgttccactttaacgactccccgggaacgaactccacgtcgtcggcgtgtacgtacaggttctctcccacgccgccataatcggccttcggatcgaagacgaaccgactcatgttgcccacgatgctcccccgagcaaacaacttgccgttgtcaatgtagcaccggttgtcctcgatctcaaaccaggggtgcttggccgtggacttccagggccggagcgcgtcttccccggctttagtgatgccatcgggcaggcggatcaagggacccatggaggtccaaagacccacccaggctttccagagattgttcatggtgaaacagcgtgtggactgtacgctctttcccaagttatatcccagagtagtgacgtgagcccagccacctcccagattcctgacgttttggttagctttcctgccaattcctcccgtagacttatgattctcctagcccattcccgataaaaatacacggagacagtagatagagttacgaataaaccggtttatttattcaagtgtctcaggagattattgaacgagcgtggataccacgccatcgtcagttcatggtggcattgagcagccatagcaccagagtcccggcgcccggtatcagacatgctgacctaccgggcgcctccgagtccatatcccgcggcctgggtgttagagtccgtacctggcagcccaggtaggtttcaggtaccagctggttcgtacctgttaaataaatcgcagacgggcgctcacccctacggtcaggagcacaagaacaaccagagagaacagatatacgagcagggttctgaacagcagaccccaattgtcgtctctcatgcttcgctgaaggtaccagttgatggtctgagagctatagtccatcctcacctggggaacacacgcggcatatttcttggggtctccccacctcgtagacaacgtgatgtccaccatatccacggtgtgcgacaccgggtacccaccgatgttccactcgaaataggctccgcgctcatcatggtggtactgctcaccggacacttgcaatctgtccatgtaagattgagagacgatacccacgttcacaaagtgtttcttggtgaagttgcccgacatcctccccttgaagtacagcatgcccatatggaaccagcattggttctcctccacccgaaagtgggccgatttgatctccgataccaccacattcaggggccggggcaccgagtccgcgagtctcaggaacaggacggccaggatcgcgagcaccaacaccggcttcatggctccgaaggtccgctgctcggctccgctcaccgctccggtctggctgcagcagtgcttcgctgagaagtagcgtgtggactgcacggtgtttttgaatatatagcgtttcttggtgacgttgtttcccctacgtagtaggcaactacgtgccaaaagaggcgttacggtactttccgtaccgggatttccaaaccgcgactttccacacggcggtttcaacaccgggacttttcacacggtgatttcggcaccgggactttccacacggcggtttcgccaccgctgacgttctcatcgccgcccacgtcaacggtggcgacaccgtactttcccatgcggtttataaacgtcaagagtcacgtcagtcgcccacccccattacacggcgatatcccgatagggcatgaggggacccgggtgtcgcgacatgtcgacgacaggtgcggattagtggtcgtgtcgcgacatggacgtgcagggggatgtctgtcgcgatagagttgatgtgacagcccgctacacctctctgtcgcgacatgcatacacaacgggccggcttgtcggcgattgtcgcgacatatcgttatcagttagcgaccggagttgtctatcgcgacatatcgtcgactatcgcgacagaaaaaataccgttcgtagagaatgccgtgttgaaggaacgcgcttttattgagacgataaaacagcatcaggagccacaacgtcgaatcccacgtccagtcgattcgtatgttatgctgcacagcaatgctagaataacaaccagcagggtaatcccgcaacataaatacaaagtcacagcgaagaatccgtgtcgttctatcaagcgaaacgcgttccaaacggccccgtcacagacgcagttattcataagcgttaacaaccggtggctaggatgaatatccaaatcacagggcagtagccgacggactcgttgacaggtcagcctaccctcaaggttcctatcgttcggacgggatttgtgcgttttaggcctctttttcgccgcctgcaagcattggtgcgcaaagtcctcacccagctgtttccagctatcatctgcatctgtgcagtcccctgtatcgttgtaacaaacgggtctgtgcgactttgttctcggaacacaagcttgtcgcggagacagagagagaagggttttcgggtcacgcgaagaccgctcaccgggggtcggcaacgcacacatcaacagaaaaccgagacggatcaagaggtccatagtgaagaaggagcgatatcgacgtacttacgaaacggcgattatatatgttctcaacaataccgccctacgttgtatgatgtaacgtgtgacgtgagtctgatccaacactgaacgctttcgtcgtgtttttcatgcagcttttacggaccatgacaagcctgacgagagcgttcatcggggcatgaagtacgcattacacaaactccatatatttgttacgatagaatacggaacggaggaggctttcgccacacctatcctgaaagcgttgcattctttatgataggtgtgacgatgtctttaccattcccacggctgctttgcgtgatgatgacattcatcatgtatttccattcacacataccttttgtgcatacggtttatatatgaccatccacgcttataacgaacctaacagtttattagcccttgacaggataggtcaaaagattatatgtaggttttccggtaaaccgaattgtgatatttctctgcaggaaatagaacagcctggtacctataaaacggacaatgcagtactgtagcagcgtaaccaagtaggtccacatgaacacgtacaaaattatggtaagccatcgtttttcataccacagcctgtagctgtcgtacatgaatgaggacggtcgaggaacccagggtagttgtaattgggggcgacattcgtactgtccagaagacaattgcacgggtttcagtgagatgagtactttagcgatgtcggcgggggcgctacgtttcaccgtgacggtgagaacttgaccgtcgttttgtacttcatgaggcacgttatacaagccactggtatcatgaaggatgacctctgatgcgatgtgaggattaaattgtccctcaaaccgccaaacgctggtcatgtttccaccgtcaattacgcagctgacggtgtgagataccacgatgttggacttaggtttgggggctaattgcctttttacaaattcccttctgtattgcaggtcctgctgccactgcttttccgtgcggaaagtcgccatgtcttccacacgtgtggcgacgatagacgccaccaaggtagataccagaagcagctggatccgcatggtattaccgtatgtcaattagaaagttgagcggacacggttatcgttcctggcggatataagtatataaacgcgagttagcctttcccgtccgttttgtacacccgttccccacacaaatgacgaatacgaccttttttttttataaaaataaaccacgtgtattatagaaaaacatttacatagaaaagagacacacggatcaacataaggacttttcacacttttggggtacacaggcgtgccaccgcagatagtaagcgctggatacacggtatacagtcctggccagcacgtatcccaacagcagcaccatcgccatctgtatggcgatcacgaccccgagctctaagtgtctgtattcatagtgtagtcgtcgcaggttatccactgaattcccgtaactgaaataacgtatatggtaccgaggctggcaccacatgggtttgcatttggtgcacggcaccaaatgcagagtgagatggtccaagtccgtgggcacccactggcgcaaacggaatacggcttcggtggtctccacgaggcactccggggcgtgcagacggccccactttcgtccgcgacggcccgaccagccgacccgagccactatccctttctcgggatagaacgtaccctgtacacgccacacagcgtccaacacgccgtccttgacgacgcagctggcctgatagctggacacgttgttaagcggcggaaagcgaaactgacgtgccggcggagccacatagttcggttcaccgtgttgtcgcggttcgtcctccctatagtaatagtagtcgtcgtcctcataggggttgccggcgtgagccagcgttacccaacagcagcccaggccgacgaggaggcgcagccaccgcctcatggcggcttcgccagtcaatcgtctttagcctcttcttcccgtgaagtccttccggtggcgcggtgccgacctcggacccagggacgtatccacctcaggtacacacagcaggctacctggacaccgaagctgaacaaggctacgtgtttcacaaactgcaccagtaccacatagaggaatgtcaggtagcgtctctccgcaaacagccgttccaagtctgagggcgttacccgcagcggcaaccagggcagcctggacgccggccggcaatggagcacgctccggttacaggcactgcaggggtaaacggttaacatcacgtaagagagtcgtgcgtccacctgtgggagctcagtttcgtaacgtagagccccgtcattttccagctggggtgcgccgaccttgaaatgggtcgcgctccgctcgttaccccaggtgccgtaggctctcggggccgtatcggagaagttgccacgcacaagccaggcggccacgagtaccccgtgctggacgtaacattcggacacggaactggagacacggtagccggacacgtccccaaacccgcgagggtactggggcagacgaacggacttgctatttgacaacggacagatacgagacgacgaggacgcagacgactcgtcgctggaccacgacaaccggagcgactccttggagcggctcgagagtacacttactgcgatcagacaccagtgccagaagaaggaacaggtggacggggaccacaggatcatagccgccggcaccgcggccggccgcaggaagccgcccggcgcgtcgtctgtgtgcgggagccgaaacaccgtgcctctttatatcgtcccgacgtgacgcgagtattacgtgtcaggggaaacccccgtcacgacgaacgtgatttgtaagtgacgcggggtgctgacggggttcggcccgagaggtgacggagcgcctcacgtcagtatgatgtccgatccgcgtcagccccgacgtggttgtggtcaccgaaacccacgtttatatggacgttgagagcagcgcctgaccacatgattcatcataccatttctcggaatcgggcccatgccgggaaagcacattccttttcagtaaacaacaatgacatcataacaaatcattttattcgcgaggtggataataaccgcatatcaggaggagggatcgggtgatgacgcaggccccgcagaacagtccgaaataaatttttagtattgccccatagtcgcctagataccagaggtacgtcaagttcatcaaaacgcccatcggcgtcccggaatcgtataccgggcacacgaagcgttcataacaatcccgggaggcgagtgttagggtagcagagtagtttcggggtcggtttccttccggcgacgacagttccgtgggcagcagaatgtacagcgcctcggtagctgtcgcggtgccttccacgaggatgggctgccggtgcctttcgtgattttccccgtcgtgtagccaagccgaggcccgcaaagtcttaggcgaggggaattgtccatagagtttcaccgcacccttcagtacatggttctgaataacacagccgcacgtgaagtaggtaggttctctcgtctcctccgtggctgccgccaccactcccagccaccacaacaggcagatcgccagagggttccggaggcttccccggcgtagcatggttttgggttaaagcaaaaagtctggtgagtcgtttccgagcgactcgagatgcactccgcttcagtctatatatcaccactggtccgaaaacatccagggaaaatgtcggtgcagccaacctttcacatacagcccccaaaacacttgaatcactgccaccatcatcagcgtatactgcgccgacttaatcgtgagcgcgtagtacgccattagacggcgatcttcgaacaatagtcgttcgatgtcctctaacgagctccacaggggaacccaaggcacgaggcaccggggttcgcactctacataataagtttggcattgatgacagggggaaaagtagaacaacacgagttttgtgcgttggggaacacgatagtcccggagccagtagcgttttgcgacgaggctttcggagatgtcctccaccggcgtcggcactcgatccgcgtagccctccagcgtctggtagtacacccggggtgtcggcgtgggcacggacaggttcccgcgcagggtccacagagcctccagtcgaccgcccgatcggagcacgcagcgcgcctcggaatactctactcggtactccgaaacatcgggcagaggcggtaacggctccgtctccaccaagggcggaggttcatcgaaaagagtcaaggataattcaggcatactacccgcgaccggggcccagagggctagaataagcattacaagattcattctgtcttacaagggaaggctgttcccctgtctagactcaaaagctgtaaggctatcttatagcatgtagtcttgcacgtcacggggaacagggtggtgatctagtgacgtcgggagaacacggtgttttagggtgcgggggacaaaggacagtacgacagattaggtgatagaaacgtttttttttatttatgaaaaagccagtgtgccgtgcggcctagggccccggcgtagtttggataccagatgggggccgtcaggggtactaccacgagcagaaacataatgacttggtccatatatagcagcatagcggtgcgcagcaggtcgccgtccgtgtagcaatttgacggtgagcgataaagcaccgttaatgtgtcgcggataagcacgatcttgaggccgtagatgaagctcacagtcagtgctaaaatgatgcgttggtatggttcccaggactgcacggcgatgaagagccagagtatgggaagcatgaaacttagcaaacagaggatggctaaccgtcgttgcatgttccaggccatgagccaggctaggcccgtacaccagacgcagagcatggatgacaggacataggcctggattaccacggtgcgatcgaaacacagcccgatggtggacacggatatcgtagtgagggtggtatataccatgaccagcatcagggtcccgggtcggcgctgacgttccagccagtacgcgtggcaacgcagagcacagggtagcagtgtgctccagaagggcagtgtatcgcgcaggtagggggttgtcacgcgccacggtatgagcatgaaaaggatggtagtggctatggtggcgctggtctggaacacgacggtgccgtagagacgtaccatccagagaaagtgttgaacgctccgcagggtgtcttcatctttggtgattacggtgactcgacggatcggcggtggtgacggcggcgacacgggtgggggtttctctttcttatggccgagtggctcgccttggtgaaactggatctgtaccatgacgggtgctcgacgaacagtcgtcggggcttcaggtacccggcaagttttatagagaaagggggacgatgggtggtggctacgagccaccgccaccttcgcaatacgaggatctgaaggcggcaaagacggtcgtccagggcaggcgccagaggttgggactgagcacgatcagcgtgattttaaacatggtcaccagtcctacgtagatcagcagcgagccgcgtaacgtctgagcagccggcagttcgtcgcggatgtaacgcgtgccgtagaaagtcacggtcatcataaggaagacgatggcgccgtagccgtagagtagaatacgctgatgatggaacacggtctggtcgccgataacccagagcgtgatgaaaaaaacgctggtgagcacccgtgagcatatgagctcccaacgcttagcgcgaaaactgtccccaaccatgacagcgccggtgcaagctatccacagcgtgaggaccagtgtgtagtcgatgaggatggcgggcaggtcggagcaccaggtgtagaaaaccgtggtaacggagaggaggcctacgtagcccatggtcaataccacgtcgtcggggtgcctttcgccctgtatcaagaccaaacaccagagaagggagggggcaaaaaccagcagcagaggggaagattcatgttgacatatgttgtgggaatcggggatacccagccaaatcattccgcagaaagccgtactgatggcgatgtgaaagaccactagggcgtagacccggacgaggacagcaaaacggcgcagccacataaggccgtggtgcagctgcaggagggaagcccattgcggcgaatgtagcgacggcagcggcgggtccatgaggcgggtgatgcgcccgagtgaacgggtgagcgtctcggtggagtcttcttataaaccagcgggtctcaagcaaccctgctctggaacgtcgcggtggtgctgttgaggatgacgctgagcgtgccgttgtcaacccggtaatgatgataggtgcccagcttggccaggtagctgaacatttggtcccagcgtgccgaccacaccacgggcgtgagcatcaggagtgtggtgtgatagatgagtgtctcggtggcgtaaagtaccagcgagctgcggatgatgtggctcacgggcattttggtggcgatgtagcgcacgtcttggaaaaggacggccaggatgcagcccacgaacacggtgtagagacacagcagagtcttatgcaaccaggtgtaagtagaagccaggacgctgaccatcaccgtcaaaagtgtggaggtgaaaagcgcgtcacgccacacagagctgaggcggtgttcccaagccacgccgttgcaggccacgaacaacgtccacgttaggatgaggctggaaacgccgatgggcgctgtggcgcacaggttgagcccggcggtggtgaacgagagaagcgccacatacagtgcaaacaccaggccgttgctggggtgtctgtggtcggtgagctccagcgcgcccagaaccaacaccggtgtgcagctaagcaatagcggcgagggatcgtcgcggcactcgtagcccagtgaggggtaacccagccaaaccagcgcgctaatgagtacgctgaaagcggtttccagcgtcagcaatccgtagacacgcatgacgatcgcggtccgacgtagccaacacaccgcatcttcggaagctgtggacgctgtttccgaataccgggaggagatcgtgcttccctcttccaaggatcggaaagtagcgtccgtcgtttccgcggacgcggcttccctggtacgctccgtttccgacgacgcggtttcccgctgcgtggaaactgtctccatgtcgggaccgcagcgcccggcggcgtatccgcaaggtctcgaagctacagcttgtcagaggaaaagtaggtttgcaaaaaggtgcgcagggtcatgattctcagcaccatcagcagagtgaaaaccaggctgagaaacaccttgacggccgccaaaagcgcgcgttccagcggcgtctcgtagcgtacagccagggccgcttcgtggaaatgcgagacggctagacaggtaatgagcacgctgaaggacaagacgatcttaaagcaccaggaccaaccacgcctcaagatgaccaccacgattgccgtgaaggtcaacgtgatcaaagcatggatgaccacgatctgacggcggacggtacgttcgggagccaacaacgctacgccggtgcagctgagaaaggccagtaaggtgaacaacgcggccgagatgaccaacgtaccgtccaggcagagacatattacgatcaacggcggcacgtgaagcagcgtgtaaaagagcagaacgccgatattgctgggatgcgatgtttcgtaacagtgaatgaagatcaccgacgtgacgggtatgacaaagacgaggctgggcgaggactccgtgagacacagacgggaatggtgaaaccacgtcgcgggcgccgcgtagcagaaggcgctcaacaacgcggtcaagccggccagctgccaacccacggcgccataggtgtgcagcgccacgcggcaacagtcgacccaagccagactgcgggtcgccagccgggtctcttggatcccggggggcacgtagatgaccgtgccatcggtgggtacttgaaaccctttttctcttctcatggtgcgctgcgttctctggaaacggctgctctgtccgaaaaccagttccgaacgaaaatctagggcgagagggtggacaacggcgttgacgacgaagcatgggacaggtcgttcggcgttaacgtcatcgcgtcggacgacggtagttctaagagacgtagatcgctcagcaggtcctgacagttgcggattcgcaagatcagaaaaaaaagggaaatgaacgtaataaagagctgtagcgacgtatgcgccacatcgcgtggcataagaacgtgacggacgaaaaggacctgctgcgaaaagtggccggcgaagataaggcccaccgtgctgtagaagcccaaaagcagccgcaggggccaagtccagggccgcgtgaagacgatgagaacgttagccagaaagaccacgacccagacgccgttgatgagggcaaattgatcggacagggtgcagttgtcgcgacagatgaagactacttccgcgcagagcaaggtgatgaccaacgtgagcacaaacgacgtcaacacctcgcggggctcctggcaggcacacgtgacacctagcgccgggatgtgcgccaggaggccggcgagtaatagcaccagctgtcggaacggacgacggcagcgcgggtgccggtttcgctgagcgagaaccggtcgctcatagcggaaatacacgaagagcgcggaggccacaggcaccaggaggagcacctcgggcgcccagacaacgtgacaaggaaagcccggacgcgacttgagagtcgctgtagggaagaccagagagaagctacccaagacggccaccgccgtggagatttggaagaggagcaagccggcgattcggacgacaacctcgaagcgatgcacccagcccagcacggccaccacggccgcttcatcatagtcgtcgttgttgccgctgtcgaacagccgccgaaacacgatctgtcgctgggtcgcggtgggaaagcgcagacccatgacagccggaggctatatgaccgcgcgtctaagacgcgagatccgtggggggacttttagatgtttgggcggcccgcggttctaacaggcttgattggtggagacggccggcgcggcgggtgggggaaacgacgagtttttccgttacgccatggttcgcgtgaggtttctctgtacctcccgcaaaaggtcacagcccgaaatggaggccgcgttggtggccccggtggcgcgtgacgataaccaggtcatccaagcgatgagtttgtctaatgagtcctcggtggtgaaaaggatgagaatgagcaggtacaggtacaccaggttctcatagagacacaaggtgagcaggtcggcctcggaccacgcgatctcaaacaggcgcgtggtgtcaaagaccgtgacgaccagcatgaagctgagcgccatggcgtaatagcccaaaaaaagtttgtgccccaacggtacgggctgcaggtaaagtgcgatcaagaacgcgataacgccgatcacaaacagcgtgacgatgacctgccatcgacggtgattatggccggctagacccgtgacgcagctgcagaggctaaaaagcacgcaagccaagaggcccgagaaggtcaccagcgtagaggaggagcaggcgctggccacgatcaccgaaagcgtcgtgagcacgctataaatggtgagcaggcccgggctcggcggcgacgtgaacgatccttcatcgcgtttgccgtgcagcagggccaaacagatggtgggcaccatcaaactcaagggcggcataaagccggtgcaacagagaaagacggtgcctttaagatgcggaaaagccagcaccaggcccagacagagcaagaaggtgcaggtgccctgcacggccacggtgctgtagacccgcatacaaagtaaaaagcgacgtacgtcgttcgtcgagacggaggaaatcataatgactccgcgcgagggtcgcgggggtgggggcgcccaggccgtcccggtggcctctgagttcggagacatgacggcggtggctatcaaaaggcgcgtatgagaaccgtttatagagtgtaatataatcaccgtcattcccacacggcgttcccccataaagtcacgtcacactcgagtaagcgtgaaaaagctttattgttgaataaaaaacacgagtacaacaccgagttgcggtgttctgtctgtctactgggtgggggaggttcatcgtctgtctctagagggaaggtggggaacgtctaagcgagcgggagcgtgtcatctcccccatctttttacaacaagctgaggagactcacgccgtcgatgcgtccgccgtgtttctcggcgtactgctgcacccagacgtggccgctaaagatggcgacgctcatgtttaggagactcatgacgatggtgtacaacacgacgctgacacagacgctgtttttagacaacgttccacgctggtagatgagatccagggtctcgtaaataagcacggccgaagcggcggtcaccaccaggacgtagagtccgctgtagatcttgctgacccacagcacgggcgaaaagtaaagcaataggtaaaagacgatgacggaccagccgtagccaatcccgatgactttccagcgcgtgggattgttgccggccaggtaggtgagaccgctgcagagaacgaaaaagaccatcaccagggcaaacgacagaccgatgacgcgcctttctccgcaaaagcccgtgcacacggtgatgccggtgttgatcagcaagcacgccactgtgagatgagcaaaattggtggtgtgtgggcgaaactcggcgaaaccgcgtagcatagccagcgtggacacgggtacgatggaggatagggctggcactatgccgttggcgcactgtccctgcacatcggggaaggcgagccaagccagcaagcagaccgtgagggtacaagccagctgccacacgagcccgtgatagacctccatgagcagcttaaagcgtttcaaccattggaagagctgctgttcggccaccagcgcgtggctgcgatggagcggcacgatggtgaccgtcggcgactcatggtgttcggaaaccgaggcggtgtcgcccatgctgccgcttacgaccgctgtcggtctaaggtaggcgtcgatgaaacagtccgtcttatcagcacccggttaccgcggatttgattgacgtcacgagtgtggtcaaaccgtggcggcaccctgtatccgacccgtcgtcatgggctccacaaccagagcctcagaagatggtacatgccgatgaataaagccacattttcgacatagaggcgtagcgagggctgaaaactctccgggaaagaactctgacaggtgatcagggacagatcgtgaattagcatcagcgtcaccgtcaacagcgtcgtcgcgtgtaaaccgagaaagaacggggccgcggcccgcagcagccaaagtcccagcgccgtagcgcagagcagagacaggaccgacggtagccacagccgccggagagacgcgccaggatcgcaacccaaaagcgaggcccccaggcagctgagatctaccgccagggcgagaagagccgcgccgacaaaggcctgcggcgacggctggcacatcagcaaggtcagaaaggctagcgcgtgcggcaggcagtaagccaacaggagtgggagtttgcggggacaacggtcgatcgacggaccgcgtagcagcaggaacaggcagccgacgggcacgacgaggctgagatgagaaagcgacggtgggtcgtcgtcccgtccccgctcgcatagctcggccaccggtggcggcatgagccaccagctgagcacgctgagggcgacggtggcggtaagctggaaggcgacgaggacggaggcgcgcagccataccgccagcctctctaggtaggggactacctcctcgacggtccattctagcgggacgacatgaagcatggcgacaagcgcggctgctgtgaaaacgggcgcggttttataggcattaggacttccccgtcgtactggcggctgtcaaagtcccgttgtccaaaggcgcgccgtccgaaagactaatccaacggggacccgagagcatgagcaacaacgtgagaaagatggccatgctgtccaggtagagacagacggcgtgacggatgcattggttaggtgggcagaaaaagatgaccatgagactgtcgtaggccagaatacccaaaaagaagctgatagagaaggcgcacaacgtcaccactatcttctgcagccaatcggcgtcgcttagcagagcgagcgtgaggaacgaaagcagcatcaccacgtagacgcagctgatgcatttccagcgacgtcggtcacggccacctagaaacgccagccccgtaaaggagataaacaacgccagggtcatcacgtaggaacctactagtacgcggctttcagagcacatttggaagatggccgccgtcaggctgttggccaacagatagatgaaaagcaccgtggcgttactagggtgttcgttgcccaacgtgtacgtgatgaacatgcagacgatgggcacgagcacggtgagaaagaagctgtagttctcgacgcaaaagttgcggttttgtgggaaccccaaccaaaaaacgcttcccaagccgaagctgaaagccagctgaaagatgaagatggcgtacacgcgcagccatacggtgaactttttgaaccactcgagagcctccatgcgggagagcagcagcgcgttagcctcctgcgcctgcatggtggcgacggtctcggcacaaagccgctgcggcgcacctacccttctcttatacacaagcgagcgagtggggcacggtgacgtggtcacgccgcggacacgtcgattaggagacgaactggggcgacgccgctgctgtggcagcgaccgtcgcagcgaccgtcgtctgagcagtgtgggcgctgccgggctcggaaggcatgaagtagagcacggagacaaagaggtacatgaggtccatgtacaagcagagcgcgcccgggatataactctcatactcgatgtcgtgcaggatgtcctgcgtatcgcacaccaccgaggtcacgatgacggccaaaccggctatcatcaccaggatctcacttaccgcctcgggaaaaagagaaaatacggcgaatagtaagagaatcagcgtggatgcgcccgtcaatagggaacgctgtaattccacgtcgcgggcaaacagatacgtagcgagcgtgaggaaacaaaatagcgtcactgtggccaccatggcataaatgactgaacgatgactaaagtggaagcctgacgccgtgacagccacgctggtaagcaacgtgtacgtcagtaagatccatacgtttttgggaaagttgggctcggcccaacgcaacagacctaggcacacgatggagatcattaagcaagacagcgtcagacgcacgctggaaaagagctgctccagccggtgcggcaacaccagccagcaaaaggcgcagacgctcataaggatgaggcattgcacccagataaggatgtagatgcgcaacaggaagaccgaccgggctatctggacctgaccgcggagcgacatggcggcaacgccggcggttatcgccgagattcgtctaaatacacgaagcgaactagaaaacgcacacacgtgatttgcaaaaagaaagcagctgccggcttattattttattaaaaatttatctgtgcagaatcataagtttatgatgaataaaaacggggaaagggaatctgcttttagggacccgggtctggtccgtcgtctcccatctggtcgggttcggggatggggacctgtttcagcgtgtgtccgcgggcgtgcatggcttttgctcgccggccgcgctgtaaccaggcctctttctctgtggtcggcgagtcttccgacgggtagggagcctgggagtccatcgcttcaggcccaccgctcgttccctcgaccgtcgtgtcgtcctcgttttcgctattacacggggtttctggagtatcgcctatacggttggcaattctccgggggcggccgctttcgtcctcgtcgctgctatcgccgcccggtaattcgacgccgcattcgttgtacggagcgcggcacatgggcggcggaaagaacttgggcatgcgaaagcagcgttgtccatccacggtctgcgtggtttcatcgttatcctcccataatcccccctgtagcgccggcagcgtttcgacgctgtgagaggggaaggcccagttctggttgtcttgcagcgcgcccgtgggcagtaggtccgtgcggccccaggcgctgctgttgttgggtaccttgtcagtgccgcgagtaggtcgcagaaaccagtccagagcgctctctagctgcgagcgtgtgatggtgcccagtgcgccgtgccagcgcagcacgtctcttttcagcgtgtggtgacagacgggcagctcctccaaccgacactcgccgcgcaatccgcggtcgaagcggcagagaccacgcagtttaagcagaccgcacttgagaaacatgtgaaaattatcggcaatgcgatacaggtctgagtcctcgatcttgtgtaggtagaccacgccaaacttgtcgagcagcaccatgccgctgggcacaaaaggcccgtatgccaggtaatagcccacgaggccgacgacgtaccactcgcagcacaagcgttgacgaataaagttcaaaagatcgcgaaagtccgcggccggcatgtggtcaaaaggccggcaggcgcgcaggccctcgatggagcccagcatgagcaacggctccacctcggtgcgacccggcgtgcggatgaccaggttgagaccgttcatttcgcgggccgtcttggccacggccgcagcgtcagtggggtcggtgcagaggaatttttgcacatgatagcgcggttcggtggtggcgaacggcgtttgtgggtgccgatacacatattcgcaccagagtaggccgttcttggaaaaggctttgatatcactggccacctcgtagagcccgtcggtctcccagtcgtagacgtagacggtgccgtaatgacttagcatgagcacgcagggcagttcctgcgcctgcttggtgtttcgtgttagatcgctgtcgggtggacgtacggctagtacaccgacggcttccagggtgtcatcgcagcagagatagtcggcggccagagaacgtgcgtaaatctgcgggatagcggcctgttcgcgcatcactaggaaccagttggcggggttgcgcagtgctacggtggttccctggtggcgctgcacgtaggttctcagcgccggaggatcgtactggcgcagatagaggccttgcagcatcgataacgtcttttgaaagacggtgtttctaaattggaaaacgccgtagtcgcagcggatagcatcttcgcagcgctcgtcgcgctgtcggagataggtgccccaggcttcggcggcggctttggtgagtagggacatgccggcaaagccgtctcgacagcgagtcggataaagcgcgctgcgcgaaagcttaatataggagcagcgtcagacgaatcgcggctggtggcccagggggtgggacgcgccgcctacacaaagtgctcccgaaaatcgaaactcttgacccactccggagacaaatccgtattcagattgatgcgtcgcgcttccacttcggcttccgaaacctcggcctccgtccggtaggcgttaacgatacgctgacccaggtgccaacgttctttctctgccaaacgccgttgctcaaaccattcgtctacgtccttgaggtcaaagacagtgtcctcctcaaggtcaaagcctaggtcttcccactcgtcgtcatcgctctcgtggccggcggccatacgcgcggcaaccgcgtcttcccctcctcttctatcaacgttgggtaccacgttgttttcttcgggttccataggttctgcgccactgtcgtcatcatcctctccctgctcctcatcgtccgccaaggcgtcgtggatcacctccaggttctgattgtcgggtacgacgtggttatcttcgtcgtcgtcgcgtggcatgggcggcggccgacggcggacgaccggcatggcgcggccgtcgtttccttcgtcttcctcttctccgtctcccagggaacgcggtcgacggcgttccgcgaagtcgccgcggaccacgcgcgcctgccagatggtaaacgcgtcccaaccatcccagttatttagcatttcggcgcggaaacggtcgcctcgacagagccagcgaaactgccgcgcgtagtcgcggtctacgccgctgtcgaacatggtaaagtgaagacgcgccgcctcgcccatgtgtacgcagcctccgttgcgttccagcctggccgcgcgccgcagaccgtgttcgtagcggcgacgcacgtacaccttcatgaggccggcgcgaaagagttcctctaggctgtcggccagacggtagatttcaccggctagacgctgcaggggcggcgagcggtccaggtgcgacttgacgattaccacgtaaaaacgacagaaacggtcgaagatgatgaggaatgacgtgtcaaaaaaaccaccggcgcggtaggagcccacggcgcccagcaggtaccagcggcaacgcagttgcagcgtgacgtacatttcgcactcggccaagcgggcggctggcgctacctcgaagggccagcagtccgtcaagcagccgaaactggtcaggagtttcaacgttttggcatggcgtccaggtgtatgaaagttcacgtcgcgtccgtggtgttcgccaacgcaggcggccaacgcgtcggtgtcatgaccgtgacgcagcagcatcgctaccacgtcgtgcggtacccgcgtagcaaacggcgtctgtggctgacggtatacggcttcggtgtacatcataccgtaacgcgccagttcgtccagatgacgcgcgcacagcagcagaatctcttgcgagggttcgtagatgtagaggcgcgtaccgccacccatgcagagcaccagctccgtctcttcatagtgatcgtccaccatgatcacgcatttgcctagcacgataaggcgttcggggcaacaaattacgtcgtccagcagttggtcgcgcagctccggcatggtgctgccgggccgcacctgcaggaaccagttgtgcggaatgccgagcgacaacacctggtcgacgtggttacggacccagtcgcgaagcacgtcggcgctgtactggcactcaaagatgccctgaaagtcgcccatgacccgcagaaaagtttcgtagcgcgtgtggcaatagaggaattcatcgtttcgcgtaaacgtgggagctccgtcttcccagcgtgtacgccacatgtcaaaagaggccgccagctagacaccccagaaaagaagcagagaaagagagttctttgtgcgacacgttttattccgcgtcctccgctcgacgctcaaatctggatgtactcgcgcacacccgtcaggctctttaagggaaaagggtccgagtacgtcactaaccgcgactgatgcaccagggcggtaatcacccgctctgcgccctcgcgcgtcgacgaacgcgtcgtcaccaggcagtgcagccgcgggcccgtatcgtcctgatgaccagcggcctcgcgctcggctgcttccacaccgacaatgtcgggatccaacacgtagctctgcgagttggtgtcgtagcggtgtagcaccaacgtgttggggtccagacgctcccacgcgccctcgtgcgggtcaaaacgctccgttaaacagagccagtcatactgctgctgcagaatacgccgctcgcgctcgcgtcgctcatcgggcaacgcggcgtcttcgttgaagagaatgtcccgcttgtggtctacggcacgctcgtggtggtgcgggcacagatgacggtgttccatacgcgtctgacgttgacgctcgcgctcaaaacgccggtgtcgaaagaccattttcagcaaccccatgcggaaaaactccgtgatggtgttggcaacgcgccgcacgtagtggttggggtcgtccatctggatggcgtacacggcaccgaaccagtccaacagtaccagcacttcggccacaaaactgcgtcccggccgcggacgtcccgtcacgcctagcacataccacggcgtggccagattagcacggacagcccaccaccaacgacggctctccacctcggtgagcgcacaaaagggccaaatgcggtgtaactgctgcaccgttttcatcagccgcataatcaccgtgccgtaacccggtgtatgcaacttcacgtcgcaacccaggattcgttcggccgtggcgtacgagccctcaggcgttgtgtcattgagaaacaaaacatgcatggtacgcgcgcccttagggtatcgtcgcggaacaggtaccgtcattctccgcagagtggtgtgaatcacgtcgcgatacgcaatctccgaacgtgacacaccgtaacgtgccagttcgtccaggttgtgcgataccaacaccatgtacttttcacgagtgtcgtaggcgtagacgcgagaaaagcgacccataaaaaccacgtacggggtagccaccatgccatcatggtgatcgcgacgtggctcgggcaacaaaataacagcgtatcccaacggcgtcagcggctcgcggcaacagatgagctttgacgccgcctgtttggcggcggtaatgattccgtcctccgtacgtaacatcacatgccagcccttggggggacccaaggacagacagcgtccctcgttacgatgaacgtaacgcgtgatttccattggctccaggcaaaagaacagttccttaaaatcccgcaacacttgtcggtataacgccatgggatcctcagccgccacaggcagcgcggggagctccggcggcacaactgcagcgccgtcagggccagaacccgcagccggatccatcattgcgcgacactctcagccggacaaccggcgtcactgacagaagccgagccaaatacagagaaagcaacgctacaccgtcaccccgctcccaagcgccgcggaaagtgctccgatttttcaccgtcgttcgcgacgttgatttgcctcggtctgagaaccgacctagcgttcggaccggtgcgcagaaacagccggcggtccgagccactgagcggttcacagccccggccgccgatagttaccggagagacgttcgagctgcaggtacatcggcgctccccgctccgccaccccgcgcccgccccagtttatactctccgacgccccgtccaacgcgcctgtggagggccaatcggaccgcgggagctctccaagtggatgacaggcacagccgggtgcccgaccgtgaagagccctcatccacctgaacagaccgctaaccgaaggaccccgaatcgcgtccgtcggtcccgacgtccgtcgccatctggttccctgctgttggctacctctcggatttcaaaaaagagcacgtgccgatgacggtgcacaggaaagagccaaagtgtcacggcgtctttttttatttgtgttcctttcctgttttgtactcgtaaactgttgacgttgtttttacatccaaaagggcaagtaagaaacaggatgaggcatggtaggtttgggcgtggggcggccctccagcacggcggcccgggccgcccggcgggtgagcacccggcgttgcgccgtatctatcttgtgtttcttctgtgtctttttcctatcttgttccgcgacggcctctttcatcacgttcagcatgcgttcctcgacgccctccagggatcctggggaggagggagtcctagtgaggcttccaatgttgttttgtggattttcggtttccttttcttggtcgtcatcgtcggacgtgtcgtcttcctcttgatcctcttcttcgtccgagtagtagacgcatagtccctggttcatcaggctgggattcatcaggttctgacggggaatccgctgttgtagacgtttaaccgcccgttccaggcgagagctcatgccgcaccagacgctgtaacgccgcacgggcccgtagcgggctgtttgttcgcgtacatgatcgttgagctcttgccaatattgtttggcacactccagatcggaggtttgtggatagtcgggtcggatccgcggatcccaactgacatcggcggtgccagagacttcgtccagactgttacgcatagagcaccagtcgggtcggacgataaacctgtccttgcggattaaccatttataacgtagttcgtgatggcgtgtagaggcccgtacacgctccacggtcccaaagcggtcccagaagggaaagttttcgtgagggcagcgacccggcacttccagacgttcggcgtcgtccacggcgtagtgaaaacgccggccggcctggtaaattttgagcagacccacggttaacaacatatccacgctgtcagccaaccgccagatctcgcgtcgagacacgtcaaaatagaaaaattcacaggctcggtcgaccaggatcacgaaatcggcgtgaaagacgccggagggtagcgactcgcccaccacacccattatcatggtttcgcagcataagcggtccacaaagaacttcaacaggtcgttgaattgctccgtctccatacagatgaagggccagacgcctttgaggttctcggcctggccgcagagcagcaacggacgcgtcatctcgcctggagtgcgcagaggcacgcattcgccgcgataacgacaggtcacacgctgcagttcgctgatgctgttgtcgtgcaggcgaaggtcgcagataatatgatccggttgcgtggttagcagcggcgtgcgcatctgctcgccgtagatggcctcgcagtgcaacagtccgtgtcgcgcaaaatcatccagactgtgcgccaggtagtaaagcaccccgcaatcgcggtctaaacaccacacggtttcgtaacgtcctagcaggagcaccagacgggcctggctaggtggctcaatttcctctacatatacgaaaaagtcgtcatcgtccgagtcctcgtcctcagaagaggaccgcggcccgtgtactctgggcaacacggtggtagagaactgcaggacgcccagagactcgagcgactcttcgcagcagatgagctgaccccagggcgtttcgggcccgtcggtgacagccgcgctgccaaagatgtcctcaaactctacaaaatctagacgccatccgggtggcgctgaaacgggaaggctaatgttcatatcagcatagctacgaactaagtggcggatgtcctgccgcaagtcttggcagagaatgagctttcgtaaacccttgagggtcctccgaacaacggccccagacgcgtagcgataggactggcgcatggtgccgcggcgtggagcggcacttggcagcctattttatggagtttcttcagtgacgtggcttgttcacgtcgttcgtgggctgcggttggcagctccggtctgtaaaccacccgaaaagactgacatcgacgtcaaagactcacgtaatttggaacatgtgcgaccgcaaagtgcgtcagaatagcacgtggctttaggacataaaaagtaccgtgaggtctagacgtggtttttgtgattgacacttacaccaggtaagccaagggacggtgaaactgtatgtgaggaacctgggtgcttagacaactaacgtgtaatgctttttacaggaccgttcaacaggtgatactacctgcaaggtaatgactacatctactacaactaccactaatatcatgctacaggtgagcaacgtaacgaatcacaccttgaatagcaccgaaatttatcagttgttcgagtacactcggttcggggtatggttgatgtgcatcgtgggcacgtttctgaacatgctggtgattaccaccatcctgtactaccgtcgtaagaaaaaatctccgagcgatacctacatctgcaacctggctgtagccgatctgttgattgtcgtcggcctgccgttttttctagaatatgccaagcatcaccccaaactcagccgagaggtggtttgttcgggactcaacgcttgtttctacatctgtctttttgccggcgtttgttttctcatcaacctgtcgatggatcgctattgcgtcattgtctggggtgtagaattgaaccgcgttcgaaataacaagcgggctacctgttgggtggtgattttttggatactggccgcgctcatggggatgccacactacctgatgtacagtcataccaataacgagtgtgttggtgaatttgctaacgagacttcaggttggttccccgtctttttgaacaccaaagtcaacatttgcggctacctggcgcccatcgtgctgatggcgtacacgtacaaccgtatggtgcggtttatcattaactacgtgggtaaatggcacatgcagacgctccacgttcttttagttgtggttgtatcttttgccagcttttggttccccttcaatctggcactatttttagaatccatccgtcttttatcgggaacgcaaaacgagactctccaaaccgttattactttctgtctatacgtcggtcagtttttggcctacgttcgcgcttgtctgaatcctgggatctacatcctagtaggcactcaaatgaggaaggacatgtggacaaccctaagggtattcgcctgttgctgcgtgaagcaggagataccttaccaggacattgatattgagctacaaaaggacatacaaagaagggccaaacacaccaaacgtacccattatgacagaaaacatgcacctatggagtccggggaggaggaatttctgttgtaattcgatcctctctcacgcgtccgccgcacatctatttttgctaattgcacgtttcttcgtggtcacgtcggctcgaagaggttggtgtgaaaacgtcatctcgccgacgtggtgaaccgctcatatagaccaaaccggacgctgcctcagtctctcggtgcgtggaccagacggcgtccatgcaccgagggcagaactggtgctatcatgacaccgacgacgacgaccgcggaactcacgacggagtttgactacgatgaagacgcgactccttgtgttttcaccgacgtgcttaatcagtcaaagccagttacgttgtttctgtacggcgttgtctttctcttcggttccatcggcaacttcttggtgatcttcaccatcacctggcgacgtcggattcaatgctccggcgatgtttactttatcaacctcgcggccgccgatttgcttttcgtttgtacactacctctgtggatgcaatacctcctagatcacaactccctagccagcgtgccgtgtacgttactcactgcctgtttctacgtggctatgtttgccagtttgtgttttatcacggagattgcactcgatcgctactacgctattgtttacatgagatatcggcctgtaaaacaggcctgccttttcagtattttttggtggatctttgccgtgatcatcgccattccacactttatggtggtgaccaaaaaagacaatcaatgtatgaccgactacgactacttagaggtcagttacccgatcatcctcaacgtagaactcatgctcggtgctttcgtgatcccgctcagcgtcatcagctattgctactaccgcatttccagaatcgttgcggtgtctcaatcgcgccacaaaggtcgcattgtacgggtacttatagcggtcgtgcttgtctttatcatcttttggctgccgtaccacctgacgctgtttgtggacacgttaaaactcctcaaatggatctccagcagctgcgagttcgaaagatcgctcaaacgtgcgcttatcttgaccgagtcgctcgccttttgtcactgttgtctcaatccgctgctgtacgtcttcgtgggcaccaagtttcggcaagaactgcactgtctgcttgccgagtttcgccagcgactcttttcccgcgatgtatcctggtaccacagcatgagcttttcgcgtcggggctcgccgagtcgaagagagacatcttccgacacgctgtccgacgaggtgtgtcgcgtctcacaaattataccgtaataaaaaagcgctacctcggccttttcatacaaaccccgtgtccgcccctcttttccccgtgcccgatatacacgatattaaacccacgaccatttccgtgcgattagcgaaccggaaaagtttatggggaaaaagacgtaggaaaggatcatgtagaaaaacatgcggtgtttccgatggtggctctacagtgggtggtggtggctcacgtttggatgtgctcggaccgtgacggtgggtttcgtcgcgcccacggtccgggcacaatcaaccgtggtccgctctgagccggctccgccgtcggaaacccgacgagacaacaatgacacgtcttacttcagcagcacctctttccattcttccgtgtcccctgccacctcagtggaccgtcaatttcgacggaccacgtacgaccgttgggacggtcgacgttggctgcgtacccgctacgggaacgccagcgcctgcgtgacgggcacccaatggagcaccaacttttttttctctcagtgtgagcactatcctagtttcgtgaaactcaacggggtgcagcgctggacacctgttcggagacctatgggcgaggttgcctactacgggggttgttgtatggtgggcgggggtaatcgtgcgtacgtgatactcgtgagcggttacgggaccgccagctacggcaacgctttacgcgtggattttgggcgcggcaactgcacggcgccaaaacgcacctaccctcggcgcttagaactgcacgatggccgcacagaccctagccgttgcgatccctaccaagtgtatttctacggtctacagtgtcctgagcaactggttatcaccgcccacggcggcgtgggtatgcgccgctgccctaccggctctcgtcccaccccgtcccggccccaccggcatgacttggagaacgagctacatggtctgtgtgtggatcttctggtgtgcgtccttttattagctctgctgctgttggagctcgttcccatggaagccgtgcgtcacccgctgcttttctggcgacgcgtggcgttatcgccgtccacttccaaggtggatcgcgccgtcaagctgtgtcttcggcgcatgttgggtctgccgccgccaccgtcagtcgcaccacctggggaaaagaaggagctaccggctcaggcggccttgtcgccgccactgaccacctggtcactaccgccgtttccgtccacgcggatacctgacagtccgccgccaccgtaccagcttcgtcacgccacgtcactagtgacggtacccacgctgctgttatatacgtcatccgacatcggtgacacagcttcagaaacaacgtgtgtggcgcacgctacttatggggaacccccggagcccgctcgatcgacggctacggttcaggaatgtaccgttcttaccgccccgaattgcggcatcgtcaacaacgacggcgcggtctctgaaggccaagaccatggagatgcggttcaccatagcctggatgtggtttcccagtgtgctgctgatactggggttgttgacacctccgagtaacgggtgcaccgtcgatgttggacgaaacgtatccattcgagaacagtgccgccttcgaaacggtgcgacgttctccaagggagacatcgaaggtaacttcagtgggcccgtcgtcgtggagttggactacgaagacatcgatattactggcgaacggcagcgacttcggttccatctcagcggactcgggtgtcctacaaaggaaaatataagaaaagacaatgaaagcgacgtcaacggtggaattcgctgggctctatatatacaaaccggcgacgccaagtacggtattcgtaaccagcatttgagtatacggttaatgtatcctggggaaaaaaatacacaacagctgttgggttctgatttcagttgcgaacgtcaccggagaccgtccacgccgttgggaaagaacgccgaagtgcctcccgcgacccgcacgtcttctacatacggcgtcctcagcgcttttgtagtgtggatcggatccggcctcaatatcatctggtggaccggcatcgtgcttctggcggcggacgctctcggacttggcgagcgttggctgaggttggcactgtcccaccgggataaacatcacgcatcgagaaccgcggcgctccagtgtcaacgcgacatgttacttcggcaacgtcgacgggctcggcggctgcacgccgtttctgaaggcaaactgcaggaagagaagaaacgacagtctgctctggtctggaacgttgaggcgcgaccctttccgtccacacatcagctgattgtgctgccccctcctgtagcgtcagctcctcctgcggttccctcgcagccccccgagtattcgtctgtgtttccgcctgtataaaaataaagagacgggaggctgatcgcggccttcagcgtctcatttgtctttactctcgagtgcggtcggtgtctcatcggtgagacgaggccgccgcccgacaagttcgatctcatgtcgctcttggagcgcgaagagagttggcgtcgcgtagtcgactactcgcacaacctgtggtgtacgtgcggtaactggcaaagccacgttgagattcaggacgaggagcccaactgcgagcagccggagcccgcacactggctagaatacgtggcggtccagtggcaggcccgggttcgcgattctcacgatcgctggtgtctctgcaacgcctggcgtgatcacgccttgcgcggccgttggggtacggcgtattcctcgggttcctcggcctcttcctccggtttcgtcgcggagagcaagttcacctggtggaaacgactgcgccacagtacccggcgctggttgtttcgccgccggcgagctcgatacactccgtctaactgtggggaaagtagcactagcagcggccagagtagcggtgacgagagtaactgcagtctacgcacccacggcgtgtacacacggggtgaacaacactaatcgataagtcgcgtgtaggcgactggctacatcaaccggatatctgcggggatttaaaaagacgacccgttgtcatccggcttagagcaaaccgtccttttatcatcttccgtcgccatggctatgtacacatccgaatccgaacgcgactggcgtcgtgtaatccacgactcgcacggcctgtggtgcgattgcggcgactggcgagagcacctctattgtgtgtacgacagccattttcagcgacgacccacgacccgagccgaacggagggccgccaattggcggcgacagatgcggcggttacaccgtctgtggtgtttttgtcaggactggaagtgtcacgcgttatacgccgagtgggacggcaaagaatccgacgacgagtcgtcggcgtcttcctcgggcgaagcgccagagcaacaggtccccgcttggaagaccgtgcgagccttctcgcgggcctaccaccaccgcattaaccggggtctgcggggcacgcccccaccgcgcaacttgccgggatacgagcacgcttccgagggctggcggttttgcaatcgacgggaacggcgagaggacgatcttcgcacgcgggctgagccggaccgcgtggtgttccagttagggggagtacctcctcgccgtcaccgggaaacttacgtgtaagaacacggcgtgacaataaacaacatagcgtaaatccccgtgtgatgtgtgtgattgacgttcgggaaacatgtccccatcatcagcgtcacaactgacgtgggttggtcactgacgtgcaggatgttacgcgagtcagagaatcgcataagaacggggtggtgagcgggttcccacaggagtctctggcgcaaaagcaccatgagcctcaggttccccgagagggcgggttacgagaaactgggataccgcccgcatgccaaacgcgtgtgggtgcatgacccgttgggattgacgcggtttatcatgaggcaactcatgatgtacccgctggtgttgccgttcacttttccgttttacgtgccgcggtcctagcacgtcagtggtgacgctgataattgcaacatggcccatgacgaacccgcttgggacgaacgtcaataccacgtcaaaccgccgtgacttggctgaacgttgaaacataaagccaaagcgccgtcggcacttggcttcagagcagcgcctcggggcgatgcgacggcgatgaacttagagcaactcatcaacgtccttggtctgctcgtctggattgccgctcgtgctgtcagccgcgttggtccgcatggctccggactcgtttatcgtgagcttcatgatttctacgggtatctgcagctggaccttctgggaccagtggtggcggggaatcgctcagtccggacctggagagagcaggcggaccgagccagagggaccttcgttcggcgttcaggccttaatactagccacatcttacctgtcggcggcctgtctgggggctccggtaccttacccgccggcctgtatcgtcccgaagaagaggtgttcctcctcttgaaccgctgccatgggccactgtcaacgccgaaaagcgcttgtctggctgaggttggtgtcgctaatgccagttttttatctcgcttcaatgtcggtgattttcacggagcgtcatgggaaaacggtaccgctcccgatggagagcccggggtatgctgaaattcttcttaaaattacgtaaacgacgtcgtccagtcgttgtgccgcgattcgtacggttcatcgtctacgtcgttttgttcaccgtcgctgtgcaacgcgtgaaacaagagcgtgatgcgcaccttcggcggtatgaagaacgattgcagaaaaaccgtgcacggcgtcggcagagttttccgtgacttggggcggtgggtccgagctgcggtatgggtcacggcggcgtgcgtcttattgacaaagatgccgatgtgtgactaaaaaacgtcccagccccagagcgatgtgtttcaataaaaattatgtagtatcatattatgcgtgtcctggtttttcattttttggatgtatttgtcgcataaaaggcggtgggatgtggggatgaaatatatccagatacgcagttttgttatcctaacaaaacccgtgtcatgctaaaaacggtaatgcaggatgaaagtcccgtgtggggggggggggcatatagtagtcgcttttaccgctgggcatacgctatgcttgtatttgtgactatactatgtgcagtcgtgtgtcgatgttcctattgggaagggtgtgaatgtaggaggtataaagaatggtgggacgcaggaagacatcgctagacacagctgtattgtgctagccccgcttagcgtcatgggtaaaacggtgataaagcgtcaaaacaccatggggggggggggcaggaagcttggtggcggtgttcattaaatgcattctgtgtatttattggtacatttgcaaatcgccgagtataccggtataatgtggcaataatcgtattgtgtgtactatgcagcgaagaggacaatatcagtgtaacgtgaagcaagtgtgggaacaatgccagtgaagaatatataaaagccagaaacatacataaatgaattgctagatacagggttctttgtgtactagcccaatcatgtcaatacaatgtgtacagaaaaaagacgcaacaacgacggggggggggggggcgtacgattaattctacatattacagtacaggctaccgcgtggtgttgtgtatgttacgatgcggtgtgcctgtcggtgtaattggatgtatgttacttatccgtggcgttgtgatagtgttgtgaaaaataattgtcgtgagcataatgacagctgcaatataaaatcactttattaagcattgtaatgataatgcgtggctacattagaaaacgtgacgcgtcgcatgtcgcggcacaatctggcagcggggtcggggtagggtacggtgggaggcatgtacacagatggaacaaaagcagaagtaacgtgagacggagcatatagtccagtatccagcggttcctgagtagcaccacccatcaactgaatgccctcatgagtaaaagtctgcgggcggcagcccttggggaccgttggcatgggacgatcaatctccaaaccacagcgtaacaccgttttcttccaacgtcgttgatacacgtcgtttttacggttactccccagaacccagaaagtctcgtccaagtcgtaccaggaatcttctccagggacacgcgacggtttccaatcctcgtcgtctcgtctcaaagcacgtcccaaactggcttgaggagtcaacggtggttctgtgggtcgggtgtagcgcgagtgctttcccttcatgaccgattcgtcttccttgcctttaggctttttggtctttttgtgtatcatctggccaccggcttccataaccaccgtggccaagtccagtcccagagcttgagcgtcggcgcggcgtctggcgtcttgcagatagtcttccacatttgcacagatgaccggatgtttggtggctagggtgagcacctcagcctcgccgcggcccggacgtagcaaaaaagctaactgcccgtgcggctcgcgcgcccacagcgcggcgcgcgggtgcaggtgcagcgcgtcccagcgcggccgctcccactgctcgcggtccagctcgggcagcagccgccgcgcggcctcggcggcgggcgccgactcgcgccccagcgccagcgcgcccagcacgcccgcgcgcagaaagtgcgacagctccgccgccagcgggtacacgtgcccgtccagcgggcagtacccgaacacggcgcccagctcgtccagcaccaccaccagcatggcgcgcggcacggtccccgacgccgccggacccgccatcgccgtcggacccaccatcaccgtcggcgccgccgctgctgccgctgccgccgccgtcgcgtccgccccgaccaccgcgtgcgcgtccgcgtttggcacgcaaatcgcgctcccgccggcgcctccgtacggctgcggaggtatagtcacagcagaccccacggctcctgccatcgcgcacggcgcgtccccgccggcggcctccgtctccgtgccgctcgccgctggcggcgacgtcgtccccgtcgccggccccgccgcgcaacccagccaccgcgcgggcagcaccgcgcccagcgccagccagccgcagcacagacgctggttcaggtgccgacgcacggccgtcagcagcgacgcggggtgcggcgccgacgcgaacggctcgtactgcgccagctcctgccacgcgcccagcagcaccatcggctgcagtcgccttcccggcgtctgtagtgccaccgtcgtgccggcccaccgccggcgcagctcccgtccgagcgccgtcgcctcctcggcgcgcagcaacgtctgtcggagcgccggctgaggcagcagcgtcgcgcgcggggtgcccacgcccagccggttgcagcggtacagccgcaccacctcgcccgcgccgtgccgaaaccactcgtccgcgtcgcgcgccgctaggatcagcgtgttgttcgccaggtcgtagacgaacacgcggaacccggcgcccagcgccaggtacagtccgtcctgcgcgcacagaccctcgggatggccggccttgtcgcccaccgtcgggtcggccgcggggtccacctcgtgcaccacggtcgccaccagcacgatccacgcgtcccgcggcgacagctgacgcaggtccgtcgcgcccacgccgttcatctggctgcgcggcgtcacccgcgcgtagaatccgtacggccgtccgagcggcagcagcgtgcccgcgtcgcgctgcgaccacttgcgcatggcgcggcccgtgctgttggccagaaacgccgcgcgccacacggcgcccatggcctggtattccagctccgtcagcgcctggcgctccaccggaatctgagacagcaacaggcgctccgggccgtgccaaaagttgctgttgttgccgctactcggaggggcgcccggcggcccgcggggttctacccggtggacgccgtggcccggcgtcgccgtaggcgcagcactcgcaccagtgcccgctgttgacgtcgctcccatcggcacacaagaagaaggaggagaggaaccaacccccgaaggccctccggccccgcggccgcgaccgaggggcggggggcgcggcgacatgccgttgcgctgggccatggccgccggacacctccgacgtccactatataggaagcaaacccgcgtcagcgaccacgccgtttacacacgcggacggctccgtcgtccgtgtgccacggcagacacgcacctggcttttataggcagcgacgtgtatggcgcttgctggcgccgccttggggccgtgcagtctggaaggccgtggaaaaccacccggcagccgacgacgcactcgactggaaaaggcaggaacccggaggaacacgcgcaacagggccgcggactgggtccccgagcgcgcaccctcctaggtggacgcccgacatccattccgggccgtgtgctgggtccccgaggggcgggggggtgttttctgcgggggggtgaaatttggagttgcgtgtgtggacggcgacggcgactagttgcgtgtgctgcggtgggtacggcgacggcgaataaaagcgacgtgcggcgcgcacggcgaaaagcagacgcgcgtctgtgtctgtttgagtccccaggggacggcagcgcgggtccttggggacacacgcaaaacaacggccagacaagacgcgggcgcaagggaggagtcgcgggccccggggcacactgcacaacccgcgtcgaggacacacgcagacacggcccgccaacacaccccgacacacccctgacacaccccgccgacacacccggcacacgcccgcgacacacccggccaacacaccccgacacacccggcacacgcccgcgacacacccggccaacacaccccgacacacccggcacacgcccgcgacacacccgcggcacaccctgacacacccgccacacccggcacacacccaccccgccgcgcccccgacacaccccgaccgccgccggtgcgggacagggct

SEQ ID NO: 4 - DNA, 229483 bp, Human cytomegalovirus
gtacaggtgttggccgttgtgcccggacgggagatcgagtcccgtgatcggatcgccaagatatgcgacaattttgctattagcaaagtagcccgggatatggagcagttgttggccaccaaaaatttggagaagccactggagcagccggagaatgggtacacctacaaggccacctggttcatgcagttccgggcggtcctgtggcgatcctggctgtcggtgctcaaggaaccactcctcgtaaaagtgcgacttattcagacaacggtgagtggttccagtggaaacaaatgatataacgcttacaattcttggaaacaaattcgctagattttagttagaattgcctgattccacacccttcttagtttttttcaatgagatgtatagtttatagttttgcagaaaataaataaatttcatttaactcgcgaacatgttgaagatatgaatattaatgagatgcgagtaacattttaatttgcagatggttgccatcttgattggcctcatctttttgggccaacaactcacgcaagtgggcgtgatgaatatcaacggagccatcttcctcttcctgaccaacatgacctttcaaaacgtctttgccacgataaatgtaagtcttgtttagaatacatttgcatattaataatttactaactttctaatgaatcgatgcgatcgctggttaattaagatccagacatgataagatacattgatgagtttggacaaaccacaactagaatgcagtgaaaaaaatgctttatttgtgaaatttgtgatgctattgctttatttgtaaccattataagctgcaataaacaagttaacgggcccgctagcacgcgtaagcttaccggtcttaagctgcaggcggccgctttacttgtacagctcgtccatgccgagagtgatcccggcggcggtcacgaactccagcaggaccatgtgatcgcgcttctcgttggggtctttgctcagggcggactgggtgctcaggtagtggttgtcgggcagcagcacggggccgtcgccgatgggggtgttctgctggtagtggtcggcgagctgcacgctgccgtcctcgatgttgtggcggatcttgaagttcaccttgatgccgttcttctgcttgtcggccatgatatagacgttgtggctgttgtagttgtactccagcttgtgccccaggatgttgccgtcctccttgaagtcgatgcccttcagctcgatgcggttcaccagggtgtcgccctcgaacttcacctcggcgcgggtcttgtagttgccgtcgtccttgaagaagatggtgcgctcctggacgtagccttcgggcatggcggacttgaagaagtcgtgctgcttcatgtggtcggggtagcggctgaagcactgcacgccgtaggtcagggtggtcacgagggtgggccagggcacgggcagcttgccggtggtgcagatgaacttcagggtcagcttgccgtaggtggcatcgccctcgccctcgccggacacgctgaacttgtggccgtttacgtcgccgtccagctcgaccaggatgggcaccaccccggtgaacagctcctcgcccttgctcaccatggtggcgaccggtggatcgatcctaggcctccaaaaaagcctcctcactacttctggaatagctcagaggccgaggcggcctcggcctctgcataaataaaaaaaattagtcagccatggggcggagaatgggcggaactgggcggagttaggggcgggatgggcggagttaggggcgggactatggttgctgactaattgagatgcatgctttgcatacttctgcctgctggggagcctggggactttccacacctggttgctgactaattgagatgcatgctttgcatacttctgcctgctggggagcctggggactttccacaccctaactgacacacattccacagctggttctttccgcctcagaaggtacctaaccaagttcctctttcagaggttatttcaggccatggtgctgcgccgaattgttaattaagacaataagtctacgtagaagactaggccggccatcgattcgatttaggtgttcacctcagagctgccagtttttatgagggaggcccgaagtcgatggcaagtgtagcggtcacgctgcgcgtaaccaccacacccgccgcgcttaatgcgccgctacagggcgcgtcccattcgccattcaggctgcgcaactgttgggaagggcgatcggtgcgggcctcttcgctattacgccagctggcgaaagggggatgtgctgcaaggcgattaagttgggtaacgccagggttttcccagtcacgacgttgtaaaacgacggccagtgagcgcgcgtaatacgactcactatagggcgaattggagctccaccgcggtggcggccgctctagaactagtggatcgatcccccgggctgcaggaattcgatatcaagcttagcaaacagaggatggctaaccgtcgttgcatgttccaggccatgagccaggctaggcccgtacaccagacgcagagcatggatgacaggacataggcctggattaccacggtgcgatcgaaacacagcccgatggtggacacggatatcgtagtgagggtggtatataccatgaccagcatcagggtcccgggtcggcgccgacgttccagccagtacgcgtggcaacgcagagcgcagggtagcagtgtgctccagaagggcagtgtatcgcgcaggtagggggtcgtcacgcgccacggtatgagcatgaaaaggatggtagtggctatggtagcgctggtctggaacacgacggtgccgtagagacgtaccatccagagaaagtgttgaacgctccgcagggtgtcttcatctttggtgattacggtgactcgacggatcggcggtggtgacggcggcgacacgggtgggggtttctctttcttatggccgagtggctcgccttggtgaaactggatctgtaccatgacgggtgctcgacgaacagtcgtcggggcttcaggtacccggcaagttttatagagaaagggggacgatgggtggtggctacgagccaccgccaccttcgcaatacgaggatctgaaggcggcaaagacggtcgtccagggcaggcgccagaggttgggactgagcacgatcagcgtgattttaaacatggtcaccagtcctacgtagatcagcagcgagccgcgtaacgtctgagcggccggcagttcgtcgcggatgtaacgcgtgccgtagaaagtcacggtcatcataaggaagacgatggcgccgtagccgtagagtagaatacgctgatgatggaacacggtctggtcgccgataacccagagcgtgatgaaaaaaacgctggtgagcacccgtgagcatatgagctcccaacgcttagcgcgaaaactgtccccaaccatgacagcgccggtgcaagctatccacagcgtgaggaccagtgtgtagtcgatgaggatggcgggcaggtcggagcaccaggtgtagaaaaccgtggtaacggagaggaggcctacgtagcccatggtcaataccacgtcgtcggggtgcctttcgccctgtatcaagaccaaacaccagagaagggagggggcaaaaaccagcagcagaggggaagattcatgttgacatatgttgtgggaatcggggatacccagccaaatcattccgcagaaagccgtactgatggcgatgtgaaagaccactagggcgtagacccggacgaggacagcaaaacggcgcagccacataaggccgtggtgcagctgcaggagggaagcccattgcggcgaatgtagcgacggcagcggcgggtccatgaggcgggtgatgcgcccgagtgaacgggtgagcgtctcggtggagtcttcttataaaccagcggagctcaggcagccttgctctggaacgtcgcggtggtggtgttgaggatgacgctgagcgtgccgttgtcaatcaggtaatgatgataggtgccgagcttggccaggtagctgaacatttggtcccagcgtgccgaccacaccacgggcgtgagcattaggagtgtggtgtgataaatgagtgtttcggtggcgtaaagtatcagcgagctgcggatgatgtggctcacgggcattttggtggcgatgtagcgcacgtcttggaaaagaacggccaggatgcagcccacgaacacggtgtagagacacagcagagtcttatgcaaccaagtgtaagtagaagccaggacgctgaccatcaccgtcaaaagtgtggaggtaaaaagcgcgtcacgccacacggagctgagacggtgctcccaagccacgccgttgcaggccacgaacaacgtccacgttaagatgagactggaaacgccaatgggcgctgtggcgcacaggttgagcccggcggtggtgaacgacagaagcgccacatacagcgcaaacaccaggccgttgctggggtgtctgtgatcggtaagctccagcgcgcccagaaccaacaccggtgtgcagctaagcaataacggcgaaggatcgtcgcggcactcgtagcccagcgaggggtaacccagccaaaccagcgcgctaatgagcacgctgaaagcggtttccagcgtcagcaatccgtagacacgcatgacgatcgcggtccgccgtagccaacacaccgcatcttcggaagctgtggacgctgtttccgaataccgggaggagatcgtgcttccctcttctaaggatcggaaagtagcgtccgtcgtttccgcggacgcggcttccctggtacgctccgtttccgacgacgcggtttcccgctgcgtggaaactgtctccatgtcgggaccgcagcgcccggcggcgtatccgcaaggtctcgaagctacagcttgtcagaggaaaagtaggtttgcaaaaaggtgcgcagggtcatgattctcagcaccatcagcagagtgaaaaccaggctgagaaacaccttgacggccgccaaaagcgcgcgttccagcggcgtctcgtagcgtacagccagggccgcttcgtggaaatgcgagacggctagacaggtaatgagcacgctgaaggacaagacgatcttaaagcaccaggaccaaccacgcctcaagatgaccaccacgattgccgtgaaggtcaacgtgatcaaagcatggacgaccacgatctgacggcggacggtacgttcgggagccaacaacgctacgccggtgcagctgagaaaggccagtaaggtgaacaacgcggccgagatgaccaacgtaccgtccaggcagagacatatcacgatcaacggcggcacgtgaagcagcgtgtaaaagagcagaacgccgatattgctgggatgcgatgtttcgtaacagtgaatgaagatcaccgacgtgacgggtatgacaaagacgaggctgggcgaggactccgtgagacacagacgggaatggtgaaaccacgtcgcgggcgccgcgtagcagaaggcgctcaacaacgcggtcaagccggccagctgccaacccacggcgccataagtgtgcagcgccacgcggcaacagtcgacccaagccagactgcgggtcgccagccgggtctcttgtatcccggggggcacgtagatgaccgtgccatcggtgggtacttgaaaccctttttctcttctcatggtgcgctgcgttctctggaaacggctgctctgtccgaaaaccagttccgaacgaaaatctagggcgagagggtggacaacggcgtcgacgacgaagcatgggacaggtcgttcggcgttaacgtcatcgcgtcggacgacggtagttctaagagacgtagatcgctcagcaggtcctgacagttgcggattcgcaagatcagaaaaaaaagggaaatgaacgtaataaagagctgtagcgacgtatgcgccacatcgcgtggcataagaacgtgacggacgaaaaggacctgctgcgaaaagtggccggcgaagataaggcccaccgtgctgtagaagcccaaaagcagccgcaggggccaagtccagggccgcgtgaagacgatgagaacgttagccagaaagaccacgacccagacgccgttgatgagggtaaattgatcggacagggtgcagttgtcgcgacagatgaagactacttccgcgcagagcaaggtgatgaccaacgtgagcacaaacgacgtcaacacctcgcggggctcctggcaggcacacgtgacacctagcgccgggatgtgcgccaggaggccggcgagtaatagcaccagctgtcggaacggacgacggcagcgcgggtgccggtttcgctgagcgagaaccggtcgctcatagcggaaatacacgaagagcgcggaggccacaggcaccaggaggagcacctcgggcgcccagacaacgtgacaaggaaagcccggacgcgacttaagagtcgctgtagggaagaccagagagaagctacccaagacggccaccgccgcggagatttggaagaggagcaagccggcgattcggacgacaacctcgaagcgatgcacccagcccagcacggccaccacggccgcttcatcatagtcgtcgttgttgccgctgtcgaacagccgccgaaacacgatctgtcgctgggtcgcggtgggaaagcgcagacccatgacagccggaggctatatgaccgtgcgtctaaggcgcgagatccgtggggggacttttagatgtttgggcggcccgcggttctaacaggcttgattggtggagacggccggcgcggcgggtgggggaaacgacgagtttttccgttacgccatggttcgcgtgaggtttctctgtacctcccgcaaaaggtcacagcccgaaatggaggccgcgttggtggccccggtggcgcgtgacgataaccaggtcatccaagcgatgagtttgtctaatgagtcctcggtggtgaagaggataagaatgagcaggtacaggtacaccaggttctcatagagacacaaggtgagcaggtcggcctcggaccacgcgatctcaaacaggcgcgtggtgtcaaagaccgtgacgaccagcatgaagctgagcgccatggcgtaatagcccaaaaaaagtttgtgccctaacggtacgggttgcaggtaaagtgcgatcaagaacgcgataacgccgatcacaaacagcgtgatgatgacctgccatcgacggtgattatgggcggctagacccgtgacgcagctgcagaggctaaaaagcacgcaagccaagaggcccgagaaggtcaccagcgtagaggaggagcaggcgctggccacgatcaccgaaagcgtcgtgagcacgctgtaaatggtgagcaggcccgggctcggcggcgacgtgaacgatccctcgtcgcgtttgccgtgcagcagagccagacagatggtgggcaccaccaaactcaaaggcggcataaagccagtgcaacagagaaagacggtgcttttgagatgcggaaaagccagcaccaggcccagacagagcaagaaggtgcaggtgccctgcacggccacggtgctgtagacccgcatacaaagcaaaaagcgacgtacgtcgttcgtcgagacggaggaaatcataatgactccgcgcgagggtcgcgggggtgggggcgcccaggccgtcccggtggcctctgagttcggagacatgacggcggtggcgatcaaaaggcgcgtatgaaaaaccgtttatagagtgtaatagaatcaccgtcatccccacacggcgttcccccataaagtcacgtcacactcgagtaagcgtgaaaaagctttattgttgaataaaaaacacgagtacaacaccgagttgcggtgtcctgtctgtctactgggtgggggaggttcatcgtctgtctctggagggaaggtggggaacgtttaagcgagcaggagcgtgtcatctcccccatctttttataacaagctgaggagactcacgccgtcgatgcgtccgccgtgtttctcggcgtactgctgcacccagacgtggccgctaaagatggcgacgctcatgtttaggagactcatgacgatggtgtacaacacgacgctgacacagacgctgtttttagacagcgttccacgctggtagatgagatccagggtctcgtaaataagcacggccgaagcggcggtcaccaccaggacgtagagtccgctgtagatcttgctgacccacaacacgggcgaaaagtaaagcaataggtaaaagacgatgacggaccagccgtaaccaatcccgatgactttccagcgcgtgggattgttgccggccaggtaggtgagaccgctgcagagaacgaaaaagaccatcaccagggcaaacgacagaccgatgacgcgcctttctccgcaaaagcccgtgcacacggtgatgccggtgttgatcagcaggcacgccaccgtgagatgagcaaaattggtggtgtgtgggcgaaactcggcgaaaccgcgtagcatagccagcgtggacacgggcacgatggaggacagggctggcactatgccgttggcgcactgtccctgcacatcggggaaggcgagccaagccagcaggcagaccgtgagggtacaagccagctgccacacgagcccgtgatagacctccatgagcagcttgaagcgtttcaaccattggaagagctgctgttcggccaccagcgcgtggctgcgatggagcggcacgatggtaaccgtcggcgactcatggtgttcggaaaccgaggcggtgtcgcccatgctgccgcttacgaccgctgtcggtctaaggtaggcgtcgatgaaacagtccgtcttatcagcacccggttaccgcggatttgattgacgtcacgagtgtggtcaaaccgtggcggcaccctgtatccgacccgtcgtcatgggctccacaaccagagcctcagaagatggtacatgccgatgaataaagccacattttcgacatagaggcgtagcgagggctgaaaactctccgggaaagaactctgacaggtgatcagggacagatcgtgaattagcatcagcgtcaccgtcaacagcgtcgtcgcgtgtaaaccgagaaagaacggggccgcggcccgcagcagccaaagtcccagcgccgtagcgcagagcagagacaggaccgacggtagccacagccgccggagagacgcgccaggatcgcaacccaaaagcgaggcccccaggcagctgagatctaccgccagggcgagaagagccgcgccgacaaaggcctgcggcgacggctggcacatcagcaaggtcagaaaggctagcgcgtgcggcaggcagtaagccaacaggagtgggagtttgcggggacaacggtcgatcgacggaccgcgtagcagcaggaacaggcagccgacgggcacgacgaggctgagatgagaaagcggcggtgggtcgtcgtcccgtccccgctcgcatagctcggccaccggtggcggcatgagccaccagctgagcacgctgagggcgacggtggcggtaagctggaaggcgacgaggacggaggcgcgcagccataccgccagcctctctaggtaggggactacctcctcgacggtccattctagcgggacgacatgaagcatggcgacaagcgcggctgctgtgaaaacgggcgcggttttataggcattaggacttccccgtcgtactggcggctgtcaaagtcccgttgtccaaaggcacgccgtccgaaagactaatccaacggggacccgagagcatgagcaacaacgtgagaaagatggccatgctgtccaggtagagacagacggcgtgacggatgcattggttaggtgggcagaaaaagatgaccatgagactgtcgtaggccagaatacccaaaaagaagctgatagagaaggcgcacaacgtcaccactatcttctgcagccaatcggcgtcgcttagcagagcgagcgtgaggaacgaaagcagcatcaccacgtagacgcagctgatgcatttccagcgacgtcggtcacggccacctagaaacgccagccccgtaaaggagataaacaacgccagggtcatcacgtaggaacctactagtacgcggctttcagagcacatctggaagatggccgccgtcaggctgttggccaacagatagatgaaaagcaccgtggcgttactagggtgttcgttgcccaacgtgtacgtgatgaacatgcagacgatgggcacgagcacggtgagaaagaagctgtagttctcgacgcaaaagttgcggttttgtgggaaccccaaccaaaaaacgcttcccaaaccgaagctgaaagccagctgaaagatgaagatggcgtacacgcgcagccatacggtgaactttttgaaccactcgagagcctccatgcgggagagcagcagcgcgttagcctcctgcgcctgcatggtggcgacggtctcggcacaaagccgctgcggcgcacctacccttctcttatacacaagcgagcgagtggggcacggtgacgtggtcacgccgcggacacgtcgattaggagacgaactggggcgacgccgctgctgtggcagcgaccgtcgtagcgaccgtcgtctgagcagtgtgggcgctgccgggctcggagggcatgaagtagagcacggagacaaagaggtacatgaggtccatgtacaagcagagcgcgcccgggatataactctcatactcgatgtcgtgcaggatgtcctgcgtatcgcacaccaccgaggtcacgatgacggccaaaccggctatcatcaccaggatctcacttaccgcctcgggaaaaagagaaaatacggcgaacagtaatagaatcagcgtggatgcgcccgtcaatagggaacgctgtaattccacgtcgcgggcaaacagatacgtagcgagcgtaaggaaacaaaatagcgttactgtggccaccatggcataaatgactgaacgatgactaaagtggaagcctgacgccgtgacagccacgctggtaagcaacgtgtacgtcagtaagatccatacgtttttgggaaagttgggctcggcccaacgcaacagacctaggcacacgatggagatcattaagcaagacagcgtcagacgcacgctggaaaagagctgctccagccggtgcggcaacaccagccagcaaaaggcgcagacgctcataaggatgaggcattgcacccagataaggatgtagatgcgcagcaggaagaccgaccgggctatctggacctgaccgcggagcgacatggcggcaacgccggcggttatcgccgagattcgtctaaatacacaaagcgaactagaaaacgcacacacgtgatttgcaaaaagaaagcagctgccggcttattattttattaaaaatttatctgtgcagaatcataagtttatgatgaataaaaacggggaaagggaatctgcttttagggacccgggtctggtccgtcgtctcccatctggtcgggttcggggatggggacctgtttcagcgtgtgtccgcgggcgtgcatggcttttgctcgccggccgcgctgtaaccaggcctctttctctgtggtcggcgagtcttccgacgggtagggagtctgggagtccatcgcttcaggcccaccgctcgctccctcgaccgtcgtgtcgtcctcgttttcgctattacacggggtttctggagtatcgcctatacggttggcgattctccgggggcggccgctctcgtcctcgtcgctgctatcgccgcccggtaattcgacgccgcattcgttgtacggagcgcggcacatgggcggcggaaagaacttgggcatgcgaaagcagcgttgtccatccacggtctgcgtggtttcatcgttatcctcccataatcccccctgtagcgccggcagcgtttcgacgctgtgagaggggaaggcccagttctggttgtcttgcagcgcgcccgtgggcagtaggtccgtgcggccccaggcgctgctgttgttgggtaccttgtcagtgccgcgagtaggtcgcagaaaccagtccagagcgctctctaactgcgagcgtgtgatggtgcccagtgcgccgtgccagcgcagcacgtctcttttcagcgtgtggtgacagacgggcagctcctccaaccgacactcgccgcgcaatccgcggtcgaagcggcagagaccacgcagtttaagcagaccgcacttgagaaacatgtgaaaattatcggcaatgcgatacaggtctgagtcctcgatcttgtgtaggtagaccacgccaaacttgtcgagcagcaccaggccgctgggcacaaaaggcccgtaggccaggtaatagcccacgaggccgacgacgtaccactcgcagcataagcgttgacgaataaagttcagaagatcgcgaaagtccgcggccggcatgtggtcaaaaggccggcaggcgcgcaggccctcgatggagcccagcatgagcaacggctccacctcggtgcgacccggcgtgcggatgaccaggttgagaccgctcatttcgcgggccgtcttggccacggccgcagcgtcagtggggtcggtgcagaggaatttttgcacatgatagcgcggttcggtggtggcgaacggcgtttgtgggtgccgatacacatattcgcaccagagtaggccgttcttggaaaaggctttgatatcactggccacctcgtagagcccgtcggtctcccagtcgtagacgtagacggtgccgtaatgacttagcatgagcacacagggcagttcctgcgcctgcttggtgtttcgtgttagatcgctgtcgggtggacgtacggctaatacaccgacggcttccagggtgtcatcgcagcagagatagtcggcggccagagaacgtgcgtaaatctgcgggatggcgacctgttcgcgcatcactaggaaccagttggcggggttgcgcagtgctacggtggttccttggtggcgctgcacgtaggttctcagcgccggaggatcgtactggcgcagatagaggccttgcagcatcgataacgtcttttgaaagacggtgtttctaaactgaaaaacgccgtagtcgcagcggatagcatcttcgcagcgctcgtcgcgctgtcggagataggtgccccaggcttcggcggcggctttggtgagtagggacatgccggcggagccgtctcgacagcgagtcggataaagcgcgctgcgcgaaagcttaatataggagcagcgtcagacgaatcgcggctggtggccctgggggtgggacgcgccgcctacacaaagtgctcccgaaaatcgaaactcttgacccactccggagacaaatccgtattcagattgatgcgtcgcgcttccacttcggcttccgaaacctcggcctccgtccggtaggcgttaacgatacgctgacccaggtgccaacgctctttctctgccaaacgccgttgctcaaaccattcgtctacgtccttgaggtcaaagacagtgtcctcctcaaggtcaaagcctaggtcttcccactcgtcgtcatcgctctcgtggccggcggccatacgcgcggcaaccgcgtcctcccctcctcttctttcaacgttgggtaccacgttattttcttcgggttccataggttctgcgccactgtcgtcatcatcctctccctgctcctcatcgtccgccaaggcgtcgtggattatctccaggttctgattgtcgggtacgacgtggttatcttcgtcgtcgtcgcgtggcatgggcggcggccgacggcggacgaccggcatggcgcggccgtcgtttccttcgtcttcctcttcaccgtctcccaaggaacgcggtcgacgacgttccgcgaagtcgccgcggactacgcgcgcctgccaaatggtaaacgcgtcccaaccgtcccagttattgagcatttcggcgcgaaaacggtcgcctcgacagagccagcgaaactgccgcgcgtagtcgcggtctacgccgctgtcgaacatggtaaagtgcagacgcgccgcctcgcccatgtgtacgcagcctccgttgcgttccagcctggccgcgcgccgtagaccgtgttcgtagcggcgacgcacgtacaccttcatgaggccggcgcgaaaaagttcctctaggctgtcggccagacggtagatttcaccggctagacgctgcagaggcggcgagcggtccagatgcgatttgacaatcaccacgtaaaaacgacagaaacggtcgaagatgatgaggaaggacgtgtcaaaaaaaccaccggcgcggtaggagcccacggcgcccagcaggtaccagcggcaacgcagttgcagcgtgacgtacatttcgcactcggccaagcgggcggctggcgctacctcgaagggccaacagtccgtcaagcagccgaaactggtcaggagtttcaacgttttggcatggcgtccaggtgtatgaaagttcacgtcgcgtccgtgatgttcgccaacgcaggcggccaacgcgtcggcgtcatgaccgtgacgcagcagcatcgctaccacgtcgtgcggtacccgcgtagcaaacggcgtctgtggctgacggtatacggcttcggtgtacatcataccgtaacgcgccagctcgtccagatgacgcgcgcacagcagcagaatctcttgcgagggttcgtagatgtagaggcgcgtaccgccacccatgcagagcaccagctccgtctcttcgtagtgatcttccaccatgatcacgcacttgcctagcacgataaggcgttcggggcaacaaatcacgtcgtccagcagctggtcgcgtagctccggcatggtgctgccgggccgtacctgcaggaaccagttgtgcggaatgccgagcgacagcacctggtcgacgtggttacggacccagtcgcgaagcacgtcggcgctgtactggcactcaaagatgccctgaaagtcgcccatgacccgcagaaaagtttcgtagcgcgtgtggcaatagaggaattcatcgtttcgcgtaaacgtgggagctccgtcttcccaacgtgtacgccacatgtcaaaagaggccgccagctagacaccccagaaaagaagcagagaaagagacttctttgtgcgacacgttttattccgcgttctccgctcgacgttcaaatctggatgtactcgcgcacacccgtcaggctctttaagggaaaagggtccgagtacgtcactaaccgcgactgatgcaccagggcggtaatcacccgctccgcgccctcgcgcgtcgacgaacgcgtcgtcaccaggcagtgcagccgcgggcccgtatcgtcctgatgaccagcggcctcgcgctcggctgcttccacaccgacaatgtcgggatccaacacgtagctctgcgagttggtatcgtagcggtgtagcaccaacgtgttggggtccagacgctcccacgcgccctcgtgcgggtcaaaacgctccgttaaacagagccagtcatactgctgctgcagaatacgccgctcgcgctcgcgtcgctcatcgggcaacgcggcgtcttcgttgaagagaatgtcccgcttgtggtctacggcacgctcgtggtgatgcgggcacagatgacggtgttccatacgcgtctgacgttgacgctcgcgctcgaaacgccggtgtcgaaagaccattttcagcaaccccatgcggaaaaactccgtgatggtgttggcaacgcgccgcacgtagtggttggggtcgtccatctggatggcgtacacggcaccgaaccagtccaacagtaccagcacttcggccacaaaactgcgtcccggtcgcggacgtcccgtcacgcctagcacataccacggcgtggccagattagcacggacagcccaccaccaacgacggctctccacctcggtgagcgcacaaaagggccaaatgcggtgtaactgctgcaccgttttcatcagccgcataatcaccgtgccgtaacccggtgtatgcaacttcacgtcgcaacccaggattcgttcggccgtggcgtacgagccctcaggtgtggtgtcattgagaaacaaaacatgcatggtacgcgcgcccttagggtatcgtcgcggaacaggtaccgtcattctccgcagagtggtgtgaatcacgtcgcgatacgcaatctccgaacgtgacacaccgtaacgtgccagttcgtccaggttgtgcgataccaacaccatgtacttttcacgagtgtcgtaggcgtagacgcgagaaaagcgacccataaaaaccacgtacggggtagccaccatgccatcatggtgatcgcgacgtggctcgggcaacaaaataacagcgtatcccaacggcgtcagcggctcgcggcaacagatgagctttgacgccgcctgtttggcggcggtaatgatcccgtcctccgtacgtaacatcacatgccagcccttggggggacccaaggacagacagcgtccctcgttacgatgaacgtaacgcgtgatttccattggctccaggcaaaagaacagttccttaaaatctcgcaacacttgtcggtataacgccatgggatcctcggccgccacaggcagcgcggggagctccggcggcacaactgcagcgccgtcggggccagaacccgcagccggatccatcattgcgcgacactctcagccggacaaccggcgtcactgacagaagccgagccaaatacagagaaagcaacgccacaccgtcaccccgctcccaagcgccgcggaaagtgctccgatttttcaccgtcgttcacgacgttgatttgcctcggtctgagaaccgacctagcgttcggaccggtgcgcagaaacagccggcggtccgagccactgagcggttcacagccccggccgccgatagttatcggagagacgttcgagctgcaggtacatcggcgctccccgcttcgccaccccgcgcccgccccagtttatactctccgacgccccttccaacgcgcctgtggagggccaatcggaccgcgggagctctccaagtggatgacaggcacagccgggtgcccgaccgtgaagagccctcatccacctgaacagaccgctaaccgaaggaccccgagtcgcgtccgtcagtcccgacgtccgtcgccatctggctccctgctgttggctacctctcggatttcaaaaaagagcacgtgccgatgacggtgcacaggaaagagccaaagtgtcacagcgtctttttttatttgtattcctttcctgttttgtactcgtaaactgttgacgttgtttttacatccaaaagggcaagtaagaaacaggatgaggcatggtaggtttgggcgtggggcggccctccagcacggcggcccgggccgcccggcgggtgagcacccggcgttgcgccgtgtctatcttgtgtttcttctgtgtctttttcctatcttgttccgcgacggcctctttcatcacgttcagcatgcgttcctcgacgccctccagggatcctggggaggagggagtcctagtgaggcttccaatgttgttttgtggattttcggtttcctcttcttggtcgtcatcgtcggacgtgtcgtcttcctcttgatcctcttcttcgtccgagtagtagacgcatagtccttggttcatcaggctgggattcatcaggttctgacggggaatccgctgttgtagacgtttaaccgcccgttccaggcgagagctcatgccgcaccagacgctgtaacgccgcacgggcccgtagcgggctgtttgttcgcgtacatgatcgttgagctcttgccaatattgtttggcacactccagatcggaggtttgtggatagtcgggtcggatccgtggatcccaactgacatcggcggtgccggagacttcgtccagactgttacgcatagagcaccagtcgggtcggacgataaacctgtccttgcggattaaccatttataacgtagttcgtgatggcgtgtagaggcccgtacacgctccacggtcccaaagcggtcccagaagggaaagttttcgtgggggcagcgacccggcacttccagacgttcggcgtcgtccacggcgtagtgaaaacgccggccggcctggtaaattttgagcagacccactgttaacaacatatccacgctgtcagccaaccgccagatctcgcggcgagacacgtcaaaatagaaaaattcgcaggctcggtcgaccaggatcacgaaatcggcgtgaaagacgccggagggtagcgattcgcccaccacacccattatcatggtttcacagcataagcggtccacaaagaacttcaacaggtcgttgaattgctccgtctccatacagatgaagggccagacgcctttgaggttctcggcctggccgcagagcagtagcggacgtgtcatctcgcccggagtgcgcagaggcacgcattcgccgcgataacgacaggtcacacgctgtagttcgctgatgctgttgtcgtgcaggcgaaggtcgcagataatatgatccggttgcgtggttagcagcggcgtgcgcatttgctcgccgtagatggcctcgcagtgcaacagcccgtgtcgcgcaaaatcgtccagactgtgcgccaggtagtaaagcaccccgcgatcgcggtctagacaccacacggtttcgtaacgtcctaacaggagcaccagacgggcctggctaggtggctcaatttcctctacatacacgaaaaagtcgtcatcgtccgagtcctcgtcctcagaagaggaccgcggcccgtgtactctgggcaacacggtggtagagaactgcaggacgcccagagactcgagcgactcttcgcagcagatgagctgaccccagggcgtttcgggcccgtcggtgacagccgcgctgccaaagatgtcctcaaactctacaaaatctagacgccatccgggtggcgctgaaatgggaaggctaatgttcatatcagcataactacgaactaagtggcggatgtcctgccgcaagtcttggcagagaatgagctttcgtaaacccttgagggtcctccgaacaacggccccagacgcgtagcgataggactggcgcatggtgccgcggcgtggagcggcacttggcagcctattttatggagtttcttcagtgacgtggcttgttcacgtcgttcgtgggctgcggttggcagctccggtctgtaaaccacccgaaaagactgacatcgacgtcaaagactcacgtaatttggaacatgtgcgaccgcaaagtgcgtcagaatagcacgtggctttaggacataaaaagtaccgtgaggtctagacgtggtttttgtgattgacacttacaccaggtaagccaagggacggtgaaactgtatgtgaggaacctgggtgcttagacaactaacgtgtaatgctttttacaggaccgttcaacaggtgatactacctgcaaggtaatgactacatctactacaactaccactaatatcatgctacaggtgagcaacgtaacgaatcacaccctgaatagcaccgaaatttatcagttgttcgagtacactcggttcggggtatggttgatgtgcatcgtgggcacgtttctgaacgtgctggtgattaccaccatcctgtactaccgtcgtaagaaaaaatctccgagcgatacctacatctgcaacctggctgtagccgatctgttgattgtcgtcggcctgccgttttttctagaatatgccaagcatcaccccaaactcagccgagaggtgatttgttcgggactcaacgcttgtttctacatctgtctttttgccggcgtttgttttctcatcaacctgtcgatggatcgctactgcgtcattgtctggggtgtagaattgaaccgcgttcgaaataacaagcgggctacctgttgggtggtgattttttggatactggccgcgctcatggggatgccacactacctgatgtacagtcataccaataacgagtgtgttggtgaatttgctaacgagacttcaggttggttccccgtctttttgaacaccaaagtcaacatttgcggctacctggcgcccatcgtgctgatggcgtacacgtacaaccgtatggtgcggtttatcattaactacgtgggtaaatggcacatgcagacgctccacgttcttttagttgtggttgtatcttttgccagcttttggttccccttcaacctggcactatttttagaatccatccgtcttttagcgggaacgcaaaacgagactctccaaaccgttattactttctgtctatacgtcggtcagtttttggcctacgttcgcgcttgtctgaatcctggaatctacatcctagtaggcactcaaatgaggaaggacatgtggacaaccctaagggtattcgcctgttgctgcgtgaagcaggagataccttaccaggacattgatattgagctacaaaaggacatacaaagaagggccaaacacaccaaacgtacccattatgacagaaaaaatgcacctatggagtccggggaggaggaatttctgttgtaattcgatcctctctcacgcgtccgccgcacatctatttttgctaattgcacgtttcttcgtggtcacgtcggctcgaagaggttggtgtgaaaacgtcatctcgccgacgtggtgaaccgctcatatagaccaaaccggacgctgcctcagtctctcggtgcgtggaccagacggcgtccatgcaccgagggcagaactggtgctatcatgacaccgacgacgacgaccgcggaactcacgacggagtttgactacgatgaagacgcgactccttgtgttttcaccgacgtgcttaatcagtcaaagccagtcacgttgtttctgtacggcgttgtctttctcttcggttccatcggcaacttcttggtgatcttcaccatcacctggcgacgtcggattcaatgctccggcgatgtttactttatcaacctcgcggccgccgatttgcttttcgtttgtacactacctctgtggatgcaatacctcctagatcacaactccctagccagcgtgccgtgtacgttactcactgcctgtttctacgtggctatgtttgccagtttgtgttttatcacggagattgcactcgatcgctactacgctattgtttacatgagatatcggcctgtaaaacaggcctgccttttcagtattttttggtggatctttgccgtgatcatcgccattccacactttatggtggtgaccaaaaaagacaatcaatgtatgaccgactacgactacttagaggtcagttacccgatcatcctcaacgtagaactcatgcttggtgctttcgtgatcccgctcagtgttatcagctactgctactaccgcatttccagaatcgttgcggtgtctcagtcgcgccacaaaggtcgcattgtacgggtacttatagcggtcgtgcttgtctttatcatcttttggctgccgtaccacctaacgctgtttgtggacacgttaaaactcctcaaatggatctccagcagctgcgagttcgaaagatcgctcaaacgtgcgctcatcttgaccgagtcgctcgccttttgtcactgttgtctcaatccgctgctgtacgtcttcgtgggcaccaagtttcggcaagaactgcactgtctgctggccgagtttcgccagcgactcttttcccgcgatgtatcctggtaccacagcatgagcttttcgcgtcggagctcgccgagtcgaagagagacatcttccgacacgctgtccgacgaggtgtgtcgcgtctcacaaattataccgtaataaaaaagcgctacctcggccttttcatacaaaccccgtgtccgcccctcttttccccgtgcccgatatacacgatattaaacccacgaccatttccgtgcgattagcgaaccggaaaagtttatggggaaaaagacgtaggaaaggatcatgtagaaaaacatgcggtgtttccgatggtggctctacagtgggtggtggtggctcacgtttggatgtgctcggaccgtgacggtgggtttcgtcgcgcccacggtccgggcacaatcaaccgtggtccgctctgagccggctccgccgtcggaaacccgacgagacaacaatgacacgtcttacttcagcagcacctctttccattcttccgtgtcccctgccacctcagtggaccgtcaatttcgacggaccacgtacgaccgttgggacggtcgacgttggctgcgcacccgctacgggaacgccagcgcctgcgtgacgggcacccaatggagcaccaacttttttttctctcagtgtgagcactaccctagtttcgtgaaactcaacggggtgcagcgctggacacctgttcggagacctatgggcgaggttgcctactacgggggttgttgtatggtgggcgggggtaatcgtgcgtacgtgatactcgtgagcggttacgggaccgccagctacggcaacgctttacgcgtggattttggccgcggcaactgtacggcgccgaaacgcacctaccctcggcgcttggaactgcacgatggccgcacagaccctagccgttgcgatccctaccaagtgtatttctacggtctacagtgtcctgagcaactggttatcaccgcccacggcggcgtgggtatgcgccgctgtcctaccggctctcgtcccaccccgtcccggccccaccggcatgacttggagaacgagctacatggtctgtgtgtggatcttctggtgtgcgtccttttattagctctgctgctgttggagctcgttcccatggaagccgtgcgtcacccgctgcttttctggcgacgcgtggcgttatcgccgtccacttccaaggtggatcgcgccgtcaagctgtgtcttcggcgcatgctgggtctgccgccgccaccgtcagtcgcaccacctggggaaaagaaggagctaccggctcaggcggccttgtcgccgccactgaccacctggtcactaccgccgtttccgtccacgcggatacctgacagtccgccgccaccgtaccagcttcgtcacgccacgtcactagtgacggtacccacgctgctgttatatacgtcatccgacatcggtgacacagcttcagaaacaacgtgtgtggcgcacgctacttatggggaacccccggagcccgctcgatcgacggctacggttcaggaatgtgccgttcttaccgccccaaattgcggcatcgtcaacaacgacggcgcggtctctgaaggccaagaccatggagatacggttcaccatagcctggatgtggtttcccagtgtgctgctgatactggggttgttgacgcctccgagtaacggctgcactgtcgatgtcggacgaaacatgtccattcgagaacagtgccgtcttcgagacggtgcgacgttctccaagggagacatcgaaggtaacttcagtgggcccgtcgtcgtggagttggactacgaagacgtcgatattactggcgaacggcagcgacttcggtttcatctcagcggactcgggtgtcctacaaaggaaaatataagaaaagacaatgaaagcgacgtcagcggtggaattcgctgggctctatatatacaaaccggcgacaccaagtacggtattcgtaatcagcatttgagtatacggttgatgtatcctggggaaaaaaatacacaacagctgttgggttctgatttcagttgcgaacgtcaccggagaccgtccacgccgttgggaaataacgccaaagtgcctttcacgacccgcacgtcttctacatacggcgtcctcagcgcctttgtggtgtggatcggatccggcctcaatatcatctggtggaccggcatcgtgcttctggcggcggacgctctcgggcttggcgagcgttggctgaggttggcgctgtcccaccgggacaaacatcacgcatcgcgaaccgcggcgctccagtgtcaacgcgacatgttacttcggcaacgtcgacgggctcggcggctgcacgccgtttctgaaggcaaactgcaggaagagaagaaacgacagtctgctctggtctggaacgttgaggcgcgaccctttccgtccacacatcagctgattgtgctgccccctcctgtagcgtcagctcctcctgcagttccctcgcagccccccgagtattcgtctgtgtttccgcctgtataaaaataaagagacgggaggctgatcgcggccttcagcgtctcatttgtctttactctcgagtgcggtcggtgtctcgtcggtgagacgaggccgccgcccgacaagttcgatctcatgtcgctcttggagcgcgaagagagttggcgtcgcgtagtcgactactcgcacaacttgtggtgtacgtgcggtaactggcagagccacgttgagattcaggacgaggagcccaactgcgagcagccggagcccgcacactggctggaatacgtggcggtccagtggcaggcccgggttcgcgattctcacgatcgctggtgtctctgcaacgcctggcgtgatcacgccttgcgcggccgttggggtacggcgtattcctcgggttcctcggcctcttcctccggtttcgtcgcggagagcaagttcacctggtggaaacgactgcgccacagtactcggcgctggttgtttcgccgccggcgagctcgatacactccgtctaactgtggggaaagtagcactagcagcggccagagtagcggtgacgagagtaactgcagtctacgcacccacggcgtgtacacacggggtgaacaacactaatcgataagtcgcgtgtaggcgactggctacatcaaccggatatctgcggggatttaaaaagacgacccgttgtcatccggcttagagcaaaccgtccttttatcatcttccgtcgccatggctatgtacacatccgaatccgaacgcgactggcgtcgtgtaatccacgactcgcacggcctgtggtgcgactgcggcgactggcgagagcacctctattgtgtgtacgacagccattttcagcgacgacccacgacccgagccgaacggagggccgccaattggcggcgacagatgcggcggttacaccgtctgtggtgtttttgtcaggactggaagtgtcacgcgttatacgccgagtgggacggcaaagaatccgacgacgagtcgtcggcgtcttcctcgggcgaagcgccagagcaacaggtccccgcttggaagaccgtgcgagccttctcgcgggcctaccatcaccgcattaaccggggtctgcggggcacgcccccaccgcgcaacttgccgggatacgagcacgcctccgagggctggcggttttgcagtcgacgggaacggcgagaggacgatcttcgcacgcgggctgagccggaccgcgtggtgttccagttagggggagtgccgcctcgccgtcaccgggaaacttacgtgtaagaacacggcatgacaataaacaacatagcgtaaatccccgtgtgatgtgtgtgattgacgttcaggaaacatgtccccatcatcagcgtcacaactgacgtgggttgggtactgacgtgcaggatattacgcgagtcagagaatcgcataagaacggggtggtgagcgggttcccacaggagtttctggcacagaggcaccatgagccttaagttccccgagagggtgggttacgagaaattgggacaccgcccgtataccaaacgcgtgcgggtgcatgacccgttgggattgacgcggtttatcatgaggcaactcatgatgtacccgctggtgttgccgttcacttttccgttttacgtgccgcggtcctagcacgtcagtggtgacgctgataattgcaacatggcccatgacgaacccgcttgggacgaacgtcaataccacgtcaaaccaccgtgacttggctgaacgttgaaacataaagccaaagcgccgtcggcacttggcttcagagcagcgcctcggggcgatgcgacggcgatgaacttagagcaactcatcaacgtccttggtctgctcgtctggattgccgctcgtgctgtcagccgcgttggtccgcatggctccggactcgtttatcgtgagcttcatgatttctacgggtatttgcagctggaccttctgggaccagtggtggcggggaatcgctcagtccggacctggagagagcaggcggaccgagccagagggaccttcgctcggcgttcaggccttaatactagccacatcttacctgtcggcagcatgtatcggggctccgacaccttatccgccggcctgtatcgttccaaagaagaggtgttcctcctcttgaaccgctgtcacgggccactgtcaacgccgaaaaacgcttgtctggctgaggttggtgtcgttaatggaacttttttgtctcgcttcaatgtcggtgattttcacggagcgtcatgggaaaacggtaccgctcccgatggagagcccggggtatgctgaaattcttcttaaaattacgtaaacgacgtcgtccagtcgttgtgccgcgattcgtacggttcatcgtctacgtcgttttgttcaccgtcgctgtgcaacgtgtgaaacaagagcgcgatgcgcaccttcggcggtatgaagaacggttacggaaaaatcacgcacggcgtcggcagtcttttccgtgacttggggcgatgggtccgagctgcggtatgggtcacggcggcgtgtgtcttagtgacgaagatgccgatgtgtgactaaaaacgtcccagccccagagcgatgtgtttcaataaaaaaatatgtagtatcatattatgcgtgtcctggtttttcatttctggatgtatttgttacataaaaggcggtgggatatggggatgaaacatatgtagatacgcagtttgattatccgaacaaagctcgtgtgatgcgaaaaacggtactgcaggatgaaagtcccgttgggggggggggaagcagagaatagtcgcttttgccgctgggcatacgctatgcttgtatttgtgactatactatgtgcagtcgtgtgtcgatgttcctattgggaagggtgtgaatgtacgaggtataaagaatggtgggacgtagagaggcatcgctagacacaggttgatcgttgtgctagccccacgtgagcagcgtcatgggtaaagcggtgattaagcgtgaaaacaccgtaagggggggggggcaggaagcttggtggcagtggccgttagataccttacgtgtctgtattggtacatttgcgacttgtcgggtacgacggtatagtttaactatgattatattatgtatgcgcaggatacaatgccctaaaacattgtaacacgaaacgttacaatgatgggaaagatgccgataaaaatcacataaaaggcatatacacgaattactagttacacgtttgtctatgtgcgagtttaaggacacttgtataatgcgtatgacggcaaaaggccgcagaaacgacggggggggggggggtagtaacggtattaattatacgtcttgtagtacacgttatcgtgtactggtgcgcgtattacgacacaaactgcatagcgctataaccggatgtatggtatttatatgtgcgtctagcatccttgtgagattctgagagtcttcttgtaagcgtaattaaaacggtgtatgttctgcgtaaagtgcattcaaacaatgtaacagtatgggatgaataccaataaataacatataaaagccagaagtatacatacaagagttgctagacacaggtttgtctctgtgctagcccaacggcacttgtacaatccatgcaaccagaaaaaggatgcgaaaccaacgtcgtgggtggtggtggtggggggggggggtgaaagctctgttaatcattggtctcgcggtgcaaattgctgcgttttacgtgtattgttacacgggtcgcgtatccctataatcggatgtgtgttactcattcgtggcgttgttatagtattgtgaaaaagaattctcgtaagcatgttgacaactgcaaaataaaaccattttattgagcattgtaatggtagtgtgtggctacattagaaaacgtgacgcgtcgcatgtcgcggcacaatctggcagcggggtcggggtagggtacggtgggaggcatgtacacagatggaacaaaagcagaagtaacgtgagacggagcatatagtccagtatccagcggttcctgagtagcaccacccatcaactgaacgccctcatgagtaaaagtctgcgggcggcagcccttggggaccgttggcatgggacgatcaatctccaaaccacagcgtaacacggttttcttccaacgtcgttgatacacgtcgtttttacggttactccccagaacccagaaagtctcgtccaagtcgtaccaggagtcttccccagggagacgtggcggtttccaatcctcatcgtcccgtcgcaaagcacgtcccaaactggcttggggagtcaacggtggttctgtgggtcgggtgtagcgcgagtgttttcccttcatgagcgattcgtcctccttgcctttaggctttttggtctttttgtgtatcatctggccgccggcctccatcaccaccgtggccaagtccagtcccagagcttgagcgtcggcgcggcgtcgagcgtcttgcaggtagtcttccacatttgcacagatggccgggtgtttggtggctagggtgaggacctcagcctcgccgcggcccggacgtagcaaaaaagctaactgcccgtgcggctcgcgcgcccacagcgcggcgcgcgggtgcaggtgcagcgcgtcccagcgcggccgctcccactgctcgcggtccagctcgggcagcagccgccgcgcggcctcggcggcgggcgccgactcgcgccccagcgccagcgcgcccagcacgcccgcgcgcagaaagtgcgacagctccgccgccagcgggtacacgtgcccgtccagcgggcagtacccgaacacggcgcccagctcgtccagcaccaccaccagcatggcgcgcggcacggtccccgacgccgccggacccgccatcgccgtcggacccaccatcaccgtcggcgccgccgctgccgccgccgccgcatccgttccgaccaccgcgtgcgtgtccgcgtttggtacgcaaaccgcgctcccgccggcggcgccgtacggctgcggaggtaaagtcacagcagaccccacggctcccgctatcgcgcacggcgcgtccccgccggcggcctccgtctccgtgccgctcgcccccgccggcaacgtcgtccccgtcgccatcgccgtcgtccccgccgtcatcgtcgccggccccgccgcgcagcccagccaccgcgcgggcagcaccgcgcccagcgccagccagccgcagcacagacgctggttcaggtgccgacgcacggccgtcagcagcgacgcggggtgcggcgccgacgcgaacggctcgtactgcgccagctcctgccacgcgcccagcagtaccatcggctgcagtcgcctgcccggcgtctgcagcgccaccgtcgtgccggcccaccgccggcgcagctcccgtccgagcgccgtcgcctcctcggcgcgcagcaaggtctgtcgaagcgccggctgaggcagcagcgtcgcgcgcggggtgcccacgcccagccggttgcagcggtacacccgcaccacctcgcccgcgccgtgccgaaaccactcgtccgcgtcgcgcgccgccaggatcagcgtgttgttcgccaggtcgtacacgaacacgcggaatccggcgcccagcgccaggtacagtccgtcctgcgcgcacagaccctcgggatggccggccttgtcgcccaccgtcgggtcggccgcggggtctacctcgtgcaccacggtcgccaccagcacgatccacgcgtcccgcggcgacagctgacgcaggtccgtcgcgcccacgccgttcatctggctgcgcggcgtcacccgcgcgtagaatccgtacggccgtccgagcggcagcagcgtgcccgcgtcgcgctgcgaccacttgcgcatggcgcggcccgtgctgttggccagaaacgccgcgcgccacacggcgcccatggcctggtattccagttccgtcagcgcctgccgctccaccggaatctgagacagcaacaggcgctccggcccgtgccaaaagttgctattgttgccgctacccggaggggcgcccggcggcccgcggggttctacccgttggacgccgtggcccggcgtcgccgaacccgcagtacttgcaccagttcccgccgttgacgtcgctcccatcggcacacaagaagaaggagaggaagcaacccccgaaggccctccggcaccgcggccgcgaccgaggggcggggggcgcggcgacatgccgttgcgctgggccatggccgccggacacctccgacgtcgaggcgacgtccactatatagcaacacaacccgcgtcagcgagcacgccgtttacacacgcggacgtctccgttgtccgtgtgccacggccgacacgcacctggcttttataggcagcgccgtgcacggcgcttgctggcgccgccttggcgacgcgcagtctggaagcccgtggaaaaccacccggcaggcgacgacgcactcgactgggaaaggcagacgcccgaaggaagacgcgagacaggcccgcagcactcgagcgctgtcatctaggtggacgcctgacatccattccgggccgtgtgttgggtccccgtggggcgggggggtgtttttagcgggggggtgaaatttggagtcttggagtcgcgttgcggtgcggttgggacggcggcggcgcataaaagcggcgtgcggcgcgcacggcgaaaagaagacgcgtgtctgtgtctgtttgattccccggggaacggaggaagtccccaggggacgacggcagcgcgggtccccggggacacacgaagaacgcctcccaggggccagcgacgcggaaacgacgcggaaaagaggaagtccccggggggacggccgcgcgcggaaaagaggaagcgcgcggcgccgcgcgaccctggggaccgcgggggaagcaacggccgcaaagtacggcgcgacccgcgtcgaggacacacgcagaagaggcgtccggccgaggggaggggggggggctcgcgggccccggggcacacttgttgttccctccggccgccgacacgcaccccgaagccgcgcacaccgctgacacacccctgacacacccgcggcacacccgaccgacacacccgcgacacacccgccacgcgcccgacacacgcccgcgacacacccgaccgacacacccgcggcacacccgaccgacacacccgaccgacacacccgaccgacacacccgaccgacacacccgacacacgcccgcgacacacccggcacgcacgcacccacccagccgcgcccccggcacacccaacccgacgccggcgcgggacggggctgagggaactttgaggcccgtaagcgcggctgcctttgtgcgcactaccggtgcgtgtcgtcccacggtatctgttcgcgggaccggactgcgtgaggtttgcggggcgtcatcgcgctgagggatctctgtacgggtgtctccacggcgctttttgggcgcgctgggtaccgggctgcgggccggggggtgtgcgtgacggcggtagggccggggcgttgcgggtacgggggttacgttggcgacgcgggtgttgcgggtccggaccgagggacgggggtggcgcgggtgtttgcggcgaggacgcgggtgtgcggggacggggactcgccctcgcctatttaacctccacccacttcaacacacacctgccgcacaatcatgccagccacagccacaaacagcacccacaccacgccgcttcacccacagtaccaacacacgctacccttacaccacagcaacacacaaccgcctatccaaacctcggacaaacacgccaacgaagaacaccgcacgcagatggagctcgacgccgcggattacgccgcttgcgcgcaggcccgccaacacctctacgctccaacacaaccccaactacacgcataccccgacgccaaccctcaggaaagcgctcatttttccacagaacatcaccatcaactgacgcatctacttcacaacattggcgaaggcgcagcgctcggctaccccgtcccccgcgcggaaatccgccgcggcggtggcgaccgggccgacagcgcaagcgacttcgacgccgactgctggtgcatgtggggacgcttcggaaccatgggccgccaacctatcgtgaccttactgttggcgcgccaacgcgacggcctcgctgactggaacgtcgtacgctgccgcggcacaggctttcgcgcacacgattccgaggacggcgtctgtgtctggcgtcagcacctggtttttttactcggaggccacggccgccgtgtacagttagaacgtccatccgcgggagaagcccaagctcgaggcctattgccacgcatccggatcacccccatctccacatctccacgcccaaaaccaccccagcccaccatatccaccgcatcgcacccacatgctacgactcgcccacatgacacgctctttcctatcccttctacaccctcagccacggttcacaatccccgaaaccacgccgtccaacttcacgccgaaacgacccgcacatggcgctgggcacgacgcggtgaacgtggcgcgtggatgccggccgaaacatttacatgtcccaaggataaacgtccccggtagacggggtagggggatctaccagcccagggatcgcgtatttcgccgccacgctgcttcaccgatatccaataaacccatcccctcgccacgacgtctccgcgtatctttgtagcctcaggaatccgtccccacgtccatccatcccgagcactccacacgctataacagaccacggacacggcaaatgcatgcaaacttctcatttattgtgtctactactctgtgttgctacagggagtgaagggggtgaaggcaaacaaaaaaaaaaggaacaaaataatagattagcagaaggaataatccgtgcgaccgagcttgtgcttcttttgttataaggaggcaaatatactagggaaaacttaagaataggaagaaaccgaggtttgggagaaaagctgagataaaatagcgcattttccatacagaggttgttgtttttgtggatcctaagaggtttcaagtgcgaatctcaaagttctcacgagaatattgtcttcaagaatcgacaactgtggtccaagatttttttttggtctttttaggttctgcgagggacatcacgatggatcgttgcgatgaagtcacgcgtacgcctctggtgtggcgcggtgtcgtgacaggagagtgtgttttcagtgcagagctgtcttgattcctatatccgagtatctgttttctcgtaaggacggtaatcttctttggtgtaagtacatctaaaagctgcaaactatattttaagggctgtctctaggtgtactttgatgctggagtttttcgctgtgttgatgtgaataaatctactactactattatatgcagaaagagtgattatgccgagacaagattgcattggctgaactgtttcaaaaacgcctacactctacttatccgtaaacctaaggtaatactatgtgtaagttgtttttttttctttttgtagtaaaatggtgatacgtgcaattaaaactgtattccatgtttccatcctttcatttcaactttaaaggcggctttgagagcgaagaagtgcgaggataaaaatggatgactccttcgtgtccagggagtcgactactgcaacgctgattgattaaaagatggtctccgatgatgatgttgttattgatcgaatcatggtgcagaacggcgacggagaggagcgtgtccgccgccgggaaggtggtctctttctcttttcttttttcaagaaatcttccatgtgtttatcgtagtgatcgaaatcgactgatctcgggttctttttgttggtttcttttcggttaatcatgtattgttttctttttttacagaaagatacttttttcatgagcaattcctcgcccggcgccggcatgccgaggtggggccactgcgatcagcggcatgccgacgccgacccggggatcttggattcaccgttttctctcttctctctctacatacagaccgggtggcaggagcggtaaggaatcatcgtcgtctttcattcttcgatgattatggtaatactaaatcttatctaggagcatatacatctaagattggagtactagtagtcgtttgtggtttctatttttttttatatttatctatgacagtttttctgtttttcgttttgataataatataataaaaactcatggacgtgaaatctggcttggttgtggtgatttcattctcattattgttgttttctttccgtcttgcggatgaagatgttgcgatgcggttgttgttggtgttgctatacaccgagagagatgatctttttgttcttctggttcatttcctatgattgtttggctgctgaccgacgcgtcaggatgtgcagggcatgcggggaatcaggaccggacacgggataatttcatctacctatacggagatcgcggtcctcgccatgaggatcgcgacaggcgcgtcgagggggcaggaacacccttgcggattgacattcttggtggtgtttcgttgttgtcggtagttgttgttgacgatgaggataaataaaaatgaccttgtttttgttctgttttctctcgttgggaatcgtcgactttgaattcttcgagttatcggaaagctgaggtacccaaatgtctgtagcttttttctttttaccctcttgtttatcatctgcgattcgtggtaggtaggagagggaaatgataatccgagattaaggaaaggagaagataaaaaataaaaaaaaataataaaacagaagccgaccggccgccgacccgttccccaggaccagcctacgaggaacggataacgcggtggcgacggcagcggtggtggcgctgggggtggcggtagtggtgctgctgatggtagtcgggacggaggagagacgatgcatacatacacgcgtgcatgctgcatgggtggatggtacggccgggagacgcggaagagaaactcacataaaaaggtgataaaaagagcggttgaaaaaagaaaacgagattcgaccagacagaagagaaggaccggggcttggcgacccttccacgactgccgttgtcatctcggctcctccatcttctcccggccacgggcggctaagtcaccgccgttctccccatccgtccgagcgccgaccgaccagccggccgattcgcccgccggggcttctggagaacgccggggcagcagcgatctggggaagccgctaaacccctgcgtttttatatggtagctctgccgagcgcgggctgacgcgttgagtaagcggaaagacgtgtgtgacgaaaaggggtcccatggtatttcacgtgacgatgaggagatgcggtttggagcacatacggtttagaaaaagggagttgtcgtgacaagggctgagggacctctgtctccatgtgtgtataaaaagcaaggcacgttcataatgtaaaaaagaacacgttgtaaacaagctattgctgtatcattcggctgactatgcttcattcggactgattttcttttcctaacggcgtaacttaaagtgattaacgtatgatatttgttccccagagttatactatagtcatcatcctaaaattcagatataaatgaacacatgtcgtatgggattattaagaaaccgaaactctccacagttcaccatcttcttcgtcattcaaccgatgacccactccgtacaacgaatcagtctgctgcgtcatattgcaaagcacaagcgacgtatgcgaacaacttgaaacacaggctgttgtattgatgaccgttgtaccattattagtcacatcgtatagagactctccaccgtcatcccatgtttcccacccgatggaaaaccgtcttctatcatcaactgtggtaagatttcgaccctgcgaggtattcagtttcctcatatccataacctggattttatcattaaaccccaatattaaacacttttttagtaccccccacccaccaaaaaatgtgactggaccggttcctagcagctctgggagccatgttcaggttgaaccacagctacagcgaaaccgagtccagtgaccggtaaccacgtccagcccctgcgtatgtaccagtccaagcacgtccggtcattgttctacacaggaaatctaactaggtcaacgtaacctaacactctctaaacctaatttttagtagtcaaataccataattcaccgctgtactcgtctttattctctccgaaccaacgaccaaggtcgacaacgccatcgttacccttcgtgatattgcacagatctaaagatgtatgagtacaattcgttacacaaacgcttgatccattattcactagaggtgcatgtctccctgttacattacataaccatccttgattcagatggctccatttcgtagtcatcgggtcgtttttgtgttcaatggttacattgtcaccacttttaacctctactttattgaaacccgcaccttcatgtataaacaccgtcatgaaacacgctataagtacccccccccccacaatggaatgctgccaaaccggttatttcccgttatagccatggcgttcctaagcaagagctaacgccgaacctaatgcagtaaaaagcgcttgcagccagaaccagcttatgtaccagccacgataacatccggtgattgtttccacaggaaatcctaccaggcaaagccccgcttgttgtgttcctgaccaccttgtttagcaattcgtaaactgtcagcctagcgacgtccgtttagatcaaaagtcacgtatatagcgacgctgtttccacccgtttccccgtcccgccgtttccgaacaacccacccgggttcagacaaccgaccaccaacagaaatatacacacagaccaccgggagttcagttaaagatttcatcaggtttattttggctgctgctagtcttttgcttcttagaaaaaaaatacccatatagagaaataatgatagtttgacaacacatatggcagggatttcttcttcatcaataagatatgcaattcccccagggagagactttcaacaattgaatttacaaaaacaaaattacatcaggagaaagagaggatacattaataaatatattatatctggtgtatatactgaatgctgctggttcataaggtaacgatgctactttttttaattccaagatggtttttctttgttagtcttttgttgacttgctggttcctaaaagttcgcaaaaacgattgtgtgaagattttatgacgttggttgactagttcatgagattctgctgtacgtgtgatggttattcgctggttcgttctaagatgagtatcgtactgtgtctgcgatggtcgtctcttactggcattctctcggctgcctcttgctttcatgattgaaaaggaaaaaaggactccgagggcgcggtcatcttttacttttcggttttctcattggcgggtcagaggtagtcagatcatgagactgtcgtggtcgatgaaactgtgtctgctcaagtgacgtccatttcttgtacggagaaaaaagtcatcgggataaataaggctatacaaggcgttgtcaagcgtgcggctctaaacaaattaagcgatacaaaattacagtaatacgaataataaattacccccctccccctgtggtcccccgagacgagagccacccatcgtgtactctcgcaccacccacgaccacagagggaggcgggacgaagagacgacgcagagcgccatctcctcctgaaggccggcgacgttaactgctacagctgcggcggcgacgacgacagctgcgatttgtcggccgacatgccgatggtatgggcggcggcggcagtggccgcggcagcggggaggagaggagagagaagaggagcggggcgtccgaaggcgaggatggcatggtctcgccggagcgcccggcttttatgggacactcgcgtccggttgggcattgcccacaggaagatgagtcacaacttccaaaccatcttgagacccgagtaacggtttacaggtcgcacgccagtctcagctaaaaacagcggacagtcccacgctgtttctgttgtggctctctccagtttcctcatcgccatcccggtctccgtcgtcatcggaagaataccatccgctctcatgcggcagtcgatcgacctcgacgaacgagacgcggcgacgcctctctacggccgactggttgtggtggtgaaagaagagcaccagcaatcccaggaggagcaacaagccctcacatgtccaggaggtcggggagagggcctgtcggagatggccgtgaggcatcacgtacggcagctgaggagaaacggagaagaaaggaaaattaccgtcaggggccggggttcttattagaaaaacagcacgtaggtcaggatccagatgctaatggcgatcatgatgacgatgatcatgcaggccaagacgcggcgcaccaatgccgaatccaagagccgccgtgccgccggttggtggctggcggcatctagagacatggtttgggggggaccggcggcgcgaaaagacagggagatggacagtgacacggtgttttgttatgattaggacatggggaccggaagccgagacagagtactacagagtgttgaagggtaacgtgagggagatcatgtcatgggcgggctgaagaccgtgcggggaggatcgacgtgtgcggtgcttgtggaacacggtgttttaatatgtatccgcgtgtaatgcacgcggtgtgctttttagcactcggtttgataagctacgtggccgtttgcgccgaaaacacggttaccaccaattgtctcgtgaaaacagaaaatacccacctaacatgtaagtgcaatccgaatagcacatctaccaatggcagcaggtgccacgcgatgtgcaaatgccgggtcacagaacccattacaatgctaggcgcatactcggcctggggcgcgggctcgttcgtggccacgctgatagtcctgctggtggtcttcttcgtaatttacgcgcgcgaggaggagaaaaacaacacgggcaccgaggtagatcaatgtctggcctatcggagcctgacacgcaaaaagctggaacaacacgcggctaaaaagcagaacatctacgaacggattccataccgaccctccagacagaaagataactccccgttgatcgaaccgacgggcacagacgacgaagaggacgaggacgacgacgtctgacaaggaaggcgagaacgtgttttgcaccatgcagacctacagcacccccctcacgcttgtcatagtcacgtcgctgtttttgttcacaactcagggaagttcatcgaacgccgtcgaaccaaccaaaaaacccctaaagctcgccaattaccgcgccacctgcgaggaccgtacacgtactctggttaccaggcttaacactagccatcacagcgtagtctggcaacgttatgatatctacagcagatacatgcgtcgtatgccgccactttgcatcattacagacgcctataaagaaaccacgcatcagggtggcgcaactttcacgtgcacgcgccaaaatctcacgctgtacaatcttacggttaaagatacgggagtctacctcctgcaggatcagtataccggtgatgtcgaggctttttacctcatcatccacccacgtagcttctgccgagctttggaaacgcgtcgatgcttttatccgggaccagggagagttgtggttacggattcccaagaggcagaccgagcaattatctcggatttaaaacgccagtggtccggcctctcactccattgcgcctgggtttcgggactgatgatctttgttggcgcactggtcatctgctttctgcggtcgcaacgaatcggggaacaggacgctgaacggttgcggacggacctagatacggaacctctgttgttgacggtggacggggatttggagtaaaagatgcgcacacaacatcgacggtggaacaagtcatcatatacgcaaataatatgcatgtttattattttttggattctgcagaaaagcaagtgtaacaacaccactatcgccaatacttccacgtcgattacacccacaagcttaatatctactacacaactgacatctacgttacaaaccaccgaaatgtctaccactatgttcacatcctccaatggcaacgtcaacacatccacaggattcactgcaagctctgtaaaaggcacagacgtgacctcaactatttccaccatatctacccaaacatctacaactaacgtaactgtaataacaacttcaccaaacggcgacacgaattcatcgacacagcatgtaaccgatagtactgtgactttgcaaactatatcattatcaaccaacactactactatgataaatgcaaatgaaaacgtcactacaccgcttccaacttgctcatcgcctaacagtacaaataatacgatatcaaaagaatctgaaacattattggaggcggcacaaggagacaatattactataacacacaacctaaccatcacatcgtgctacaaaacagcctggcttagacattttaatatatccacacacggaaaatacacccatcccaacataagaaatggaaaatatcataaccattcattgaaaatcctccattcgcgtatactatgtgagtggcacacaaattatctaaaacatcactatgatttatgttttacatgcgatcgtaatttatctttatctctgtacggtcttaattttactcattctggtaaatatagctttcgatgttataaaactgggcatccctccgaacaaaatcaaaactttaatctgcaaatacatcctagaaacaacacaaacgggacacacgtgaatccctgggtatgtgaagaaccaaagcacgaatgggacacttctcataaaccgaccaattatgaagacaatacagccacatcatctatagatcatttataccgctataacaatcattctaacacatcacacggcagacgcactacgtggacgttagcattaatttgtgtagcctgcattctcctatttttcgtccgacgagctctaaataaaaaatatcatccattaagtgacgatataagtgaatcagaattcatagttcgatacaatcctgagcacgaggactaagcaacgtttccggataaatgtcttatgagaccatatcagaaaataaacgggcaagaaagatcaacaacgtccgaagaaacatcaatgcccgttaaccgaaatttaataacgttatggactggagatttacggttaagtggacgttactgatgattacgatatctgaaggttgcaatgacacgtgctcctgtccgtgcaattgcctttacctccaccgcctccactatcacaaattcttctaactctgtcaccgatgctaacagcacttcagctatcgcaaatggaaccacgcacaaaccctctaccgcttcttcagtcgcatcagcaaccacttcaacgctttcaaaatcatcgtcaagcgctacgccaacattaacgttttctaccattcatagtactactccctggttgaataccagcaacataacttgcaatggcagtttgtacaccgtttataaacactctaatttaaattacgaagtaattaatgtaacaggatatgtcggtggatacgtcactttgaaaaactgcagtagaacggatgtatggcacgatatagaatggataaaatatggacctcgcgcacaccaactgtgcagcattggacattattattcaacttccccactgaacggcatgtgtttagactgcaataagacctctctcactatatacaacgtaactaccgaacacgctggaaaatacgttttgcaacgttacagtgacggtaaaaaggaaaactactatttaaccgtgttatcaggaactgcaacatcgtctcctatacctgataaatgtaaaacaaaagaggaatcagaccagcataatagcagaacgtgggacaatgtaataaaaactgtaaaaaacactaacattcccctgggaattcatgctgtatgggcgggtatagtggtatctgtggcacttatagccttatacatgggtagccgtcgcgtccccagaagaccgcgttatacaaaacttcccaaatacgacccagatgaattttagactaaaacctaacatgcacatcaataaacttttgtttttatttttagccaataatgtctccgtgtggtttttgtgggttaagcacttatggtgtgaagcagaatattcatagttattaaaaacatgggtatacaatgtaacactaaactactgttactagccgcgctaatagcaactgcaaccattctaactagcattttagttccggtacttttacatgaacaagaaaaaacattttaccggcgattttttacgcaaagtcaacatgtagaaagacccatcacggtaactcagggagatacagtttacctgaacggtagtaataatccctgcaactattccagtttctggaactacggcagttgcgaactttgtggatggaacggatacatacataaacagtaccacgaaaacaaatcatgctctccgcgatttacatgttttaacgacacaaaaggtctcagacttaataacgttacatctagcgattcaggaacatacacggaatacgtgtatgaatgcgatttgccatgtaatacaagtgactatgatgaatatgacatactaaactatcttgacaattgtactactaccataaacagcaccaattatattattaccgtattgtctccacgtcattctaaacacaccaattcccacatatccacgctggttggacagctgccgtggtgacggtaattataatctgcgttttgacttactttaacgttccggcaaccctgaaacgcaaactacgaactagaaacaacgctacccacataccgtgattacaaagtacccacactagttcattcaggataaatttgtgctttgtgtagctctcagaaattgtacaaccccgcttttccactccgtcatgaaagatcgtaataaactacttatatgtattatctttattttcaccatgtgcctcatctgtctttactttaaacgccgttgtattcctaccccatctccagacaaggcagatctgcgagtggaatttccttcgttatctccgtgtgtcggcatacagtgcgctccatgaaaagacgcgtgatacatagcgtactccaggacggtacagtttatgagaacataattcaaggaaagtgcaggttcctgttgctatgttaccacaggagatcacggaacataaatgttttctgcgtatgtttttataaaagagcgtctcgaagcagtttgagccacactacggtccagatgacgagcgtaatcaaaaatatgccgcgtagtagtcgaaagccgtactgagcgtgcgaagcgggtagggtgccgaacgacgggtatgcgtcgtcgtcatctttgactataaggatcgcgaccgagttttctggcatggtaaaagctgcccactgtggcaggtatgtagcgtatccggtttggaatcgttcggctctggtccgggggatagtgaggaattctcaggggatgatatgggacccaatcactggataagacaagggtttttccccgtaagatgatcctcgtatcacatgaggtctggatatgtataaatgaggagtgaaataggcacagggaatcagatgccggccttgtgatgcagccgctggttctctcggcgaaaaaactgtcgtctttgctgacttgcaaatacatcccgccttaagtgatgagtctataaagcaccgttgtctgggtacggtaaaagtgactcggattgtagcacgtcatttttttttgtttttgcatcgtttatcgtcaccactagtgcaatattttgatcgtaaggctgaaagagtatcgttatgatgcttagagcgtggagattgatggtactacttgccgcgtactgttattatgtttttgcgaattgttcaatcagcacgacgactgctcctgtggaatggaagtctcccaaccgtcagattcccaagaatattacttgcgctaattactcagggaccgtcggcggtaacgttacttttcagggtctcaagaataaaacggaagattttttatcttggctactcgggtctggttataagtccatttgctcgttcttcccgcaactccctggtgattctaatgagcagcattacagatatgaagtaaccaacctcacgtacaattgcacctatgaccgcctgacgttactgaatctgacaacggaaaacagcaggaattactatttcagaagagaagatgcgaattccaccttctattactcttgttacaatctgaccgtgtcctaaagatcgcacgtgaagttccacagaaccgcgcagctgtagctattgtgtttacgttgcttttgaaatgttaagcgtccctacggcgctaacatgtttctaggctactctgactgtgtagatcccggccttgctgcgtatcgtgtatctagatcacgcttaaagctcgtgttgtcttttgtgtggttgatcggtttgcgtctccatgattgtgccacgttcgagtcctgctgttacgacatcaccgaggcggagagtaacaaggctatatcaagggacgaagcagcattcacctccagcgtgagcactcgtacaccatccctggcgatcgcgcctcctcctgaccgatcgatgctgttgtcgcgggaggaagaactcgttccgtggagtcgtctcatcatcactaagcagttctacggaggcctgattttccacaccacctgggtcaccggcttcgtcttgctaggacttttgacgcttttcgccagcctgtttcgcgtaccacaatccatctgtcgtttctgcatagaccgtctccgggacatcgcccgtcctctgaaataccgctatcaacgtctcgtcgctaccgtgtagctagttagccagctgtgtatagtttgttgtgttttgcttttgcatatttgttttcagtcagagagtctgaaacggggtgggagggacttttgcgggtagtgcacgctaagatgaacgggtgggctggggtgtgcttgataactcactgtttgaatacgcgctcacgcacatatgtagcactcaacatgttagcttttgcccgcacgccccggggcatgccgagctgcctttttaataaagtctgggtttccagatacgcgctggttctgattttgatggtttgtgcctctgaaggctcaacgaattgggtcgtggtttctcataggctgcctaactgtagcgcggtatctacaacagtgggacaaaacgttgagttatgcggctcggcgtcatcaggttgtaacataacccaatggggacgttaccagaatggaagtacgctggggccatggtgtaccctgtggggaccatatacccaagtctcattaggacatcgtgtagcgttcggctgttcttggacaacgttttttatgtacaacctttctcaaaatcatagtggcacttattatcgaaaaggtgacaactgtaccgacaaacatataacactatcttgtttcaacttgacggtgcatcccaaggcggctcagagcacaaccaccgtagtgacacccacggtagttacaaacgccacggcgaatgtgtcacccattacgtcgactctagcggtaaattccagcgcgtttaaacacgttagttatcaacggcaacagcgtgtcgaaaacaggacgtcatccaagaacataactaacttggcattcacctatggcagctggggcgttgcgatgctgctgttcgccgccgtgatggtgctcattgatttgggtttgcctcaatcggcttggcggcgctggcgaatccacgtggacgatgaagaacgtggtctgttaacgtaggaaataaaaagtactgtttgagcgtgactgtttccaaatcgtaccgtggtaaataaatcatggtttccggcgtgggttctcatcttatgacggttccacgattccgttggacagtgcatcatgtgtacaataaactattgattttggcgttgtttgcccccgtgattttggaatccgtcatctacgtgtatgcgccagagggagggaacgttaccctggtatctaacttcacttcaaacatcagcgtacggtggtttcgctgggacggcaaccacagtgatctcatctgtttctacaagaccaaagaaggattttcaacgccttatgtgggtttaagtctaagttgtgcggctagccagatcaccatcttcaacctgacgttgaacaactcgggtcgttacggagcagaaggtttcatgaaaagcggcgaaaatgaaacgttcctgtggtacaacttaaccgtgacactgaaatctctgaaaactacctcagctaataacgtaacaaccatcgttacaacgacgccgacggtgactggcgcggagagtaacgggactagaaatgccattttaacaccacaactacgtgctgttgctggattctccaatcaaacgccctcggaaaacaacacacacctggccttggtaggtgttgtcgtgtttttgattctgatagttgtttgtattatggggtggtggaaattgttgtgtagtaaatcagaattatagtaatgtgctttttatcagggagaaggttttgtgcccacaatgactagcccgggactatctacgtcggaaaattacaacggaaattatggactcacgaagaccgccaatacaacgcgtacaaataacagtgaccggacaacgttaggagccagtgcgtcgttgttgggaagcacggagactgcggtaaactttgacaacgcgactacgattatcccacaacgtgtggaacacccggttggggaaatacaatatcagagaacgacaacacattattcttggatgctaattattgtcatcattctcattatttttattatcatctgtctgcgagcacctcgaaaagtttacgatcgctggaaagacagtaaacagtatggacaagtgttcatgacggacacagaactatgatgttccggtacgcgttattacttcgatggataacaatcattctttgtacacgaaaatccaattattggaactacatatcaacgccatgtacttctatagttggctacagtggccagaatatcagcttatctcccgttaacaaattgtcagtcaaagacgatgcttttcaatggtatatagacaaaccgagagttactaacgcactatgtatttatcaaaataacgagtgcagtgtacaacccaatgagaacgctccgaacattaagtggcaatgtgtacagaatcatacacttattcttattaatttaacaactacatatagtagaaattactattttaattcttttgaaacccttggagtaacaatagcaaaatacaataccctgtgttacaatgtcagtgtacattctgcctaccaaacacactgttgtacaaccacgttatccatgtattcacccacacccgtacacaggtcatacacattaacttcaaccaacttcacacatgtcgcggtccattataccgccggtaacgttgaagcacaacacgatactgccaccccacatacaatgtggatcatacccctagttatcgttataacaattatcgttttaatttgtttcaaatttccccagaaagcttggaataaattcacacaataccgatacaacagtatgctcgccgccacttaaagaatcaccgtcgaggaaactaaaagctatgtacgtttatttttcagctcactgtttgaataccgtaaacataatgacgtacatatacgtggttatacaacaggtgtttgtgctatgcggagactgattaaccatatcgtgaaccatgatcttttccgatggtctgtcgtgaccgcaatgatattttacaggtattccgaaacctgtatggaggtcactgtcagagtaggtgatccagttaccctcggtagtggacatggttatcatccaggacaaaaagtacactggtataaccagtcatgcgtcggcatcagcaacggcgaaaatacgcatcctatctgcacctacgaccctcctaaacctggtagacaaaagacaatgaaaaccactccgttgccatcaccactgttgtatgaatgtcacaattccacattaagcattcttcatgtaaacgtctcagatcccagaaactattgcaggcgaaaatgtccaccaaagggtaactgtgagtttcccacatgttttacattatcgctgatttctagaacgacaaccaccagaagacccggacaaaaaactacgttgtcgcgattaaaaaccacgccaaataaacatacgcagcacaaaagatccacgcgaggaacgtcacctaaagattacaatgtaacgggtctgccgaaaggctttgcggactcgtttaccggtaacgtagaggcacatagagccaaagatgccgcacacagcgcatggattctcattgtcatcatcattatcatagtcgtcattctgtttttcttcaagattcctcaaagactccgagagaaatgggacaccaagggatacctttacaaagggaccgatggcctgcccactacggactaattatcgtgagcggacggatatgtccggtttcaaactcactgtttgaatatagggacagtccctacggaacctgagaacatgtggaaatcacctgtggtagaatgctgctcaggtacattacctttcatcgcgaaaaggtactttacctaacggctgcatgcatctttggtgtctacatcagcctccatgatgcctgcataccggtggttggcaagataggtaccaacgttacgttgaacgcggtagatgttctcccccctcgcgatcaagttcgttggtcatacggtccaggcgggcaaggctacatgttatgcattttcactggcacatcaacaacaacgtttaacagcacgcgctttaatttttcatgtctgagtaattacagcctcctcctcattaacgttaccgcgcagtatagtactacctatcgtactatgacatcgctagacgattggcgtcaccaacaacataaccatggttttcgatggactttagacacatgttacaatctgacagtgaacgaaaacggtacattccccactaccaccaccaaaaagcccactacgactacgagaacgacaactaccacaacacaaaaaacaaccaccacgagaacaaccaccaccgccaagaagacgacgataagcactacccatcataaacactccagtcccaaaaaatccaccacccctaacagtcacgtagaacatcacgttggttttgaagccacagcagcggaaacaccgttacaaccaagcccacagcaccaacacgtggctacacacgccctctgggttttagcggtcgtaatcgttattatcatcattatcattttctactttcgaataccgcaaaagctgtggctgctctggcagcatgacaagcacggcatcgtgctcatcccccaaaccgatctgtaagcaagtcgcgtaggaaatgattgcatgaaatcactgtgaaacgccaactccgtgccagctggcgcggcggacaggcctttgacgtatttgaagccaggcgcgctctcgataccgaaaggatccaagggggctttccaaagccgacgtccctgattcccttcataaagctgttgaccggccctagaaagaccaagagcatgctgtgggcccactgcggtcgcttcttgcgttatcatctgctcccgctgctactgtgtagactgccattcttactcttttttcagcggccgcagtgggcccacggcttggacattgtcgaggaggacgagtggctacgggaaatacaaggagcgacgtaccagctgtccatagtgcgccaagctatgcagcacgccggattccaagtcagagcggcgtcggtcatgatacggcgaaacgccgttgacctggaccgaccgccgctttggtcgggatcgctcccgcatttgcccgtctacgatgtgcgttccccgcggccgttgagaccgccgtcatcacagcatcacgccgtatcacccgaactgccgtcgcgaaacgggatacgttggcagtaccaagagctgcagtatctggtggaagaacaacggcggcgaaatcagtcgcgtaatgcgattccgagaccctcgttcccccctccggatccaccatcgcagccggcagaggatgcacgagacgcggacgcagaacgtgccgaatcaccacacagtgcagaaagcaccgtcagccacggcgcgagtgacaacgcagtgcggcgacggcacgaaagacggcgctataacgctctgacggtccgcagcagggactcgctgctcctgacgcgaatacgcttctccaaccaacggtgtttcggacgcgggcgtctgagacatcccgcgggaagcggtcccaacaccggcggaccgcgacccggcggtgcgggactccgtcaactacgccaacaactgacggtccgctggcagctgttccgcctacggtgccacggttggacacagcaagtctctagccagatcagaacccgctgggaggaaagcaacgtcgtgagccagacggccacgcgagtacgtacgtggtttgtgcaaagaaccacgttgtggcgtcgcacgtgggttccgggacagaacccggcggccgaagcgcaagaactggccgtcataccgccggcacccacggtgctccggcagaacgaggaaccacgtcaacagcttacgggagaggagacaagaaattcaacgcacactcaacgtgaagaagtggaggacgtttcgagagagggcgcgagagaagggaatgatgggagccgagcaagtggaaacgacgagagaaggaataatgcgggaagatatgatgatgatcatgaggttcaagagccgcaggtcacttatccagcgggacaaggagaactgaataggaggtcacaggaggagaacgaggaaggtggaccgtgtgaatcgccgccaatgacgacaaatacgctgaccgtggcctgtccgccccgagaacccccgcatcgtgccctgtttcgtctatgcttaggactgtgggtctcgagctacctggttcgacggcccatgacgatttagaatacaccgagccattcctttatttccccccatccccggtcgcttatgcgtgtcaaacactaccaataaagataatctgccaatcgcaccttatatataatatgtggtcgcgtgtggtctttttaaggagctctgaaacacagacaggtatgggcggtggccggctgccgccgctgtggctgccgctgctgatcgcctggagcgagtggggcaactgctgcctcgatgcgcctccggtggtgcgttcgccctgtctgcagccggtgcgcgaccgcaaccgcgagcggaacccgggctcaccgcagttgctgccttacggcgaccgtctggaggtggcctgcatcttccccgcgcacgactggccagaggtctctatccgagtccacctctgctactggcccgagatcgtgcgttcgctggtggtggacgcacgcagcggtcaggtgttacacaacgacgccagctgttacatcgccggcgggcgctggcgcttcgaggacggcggcgcggcgcagcggctgagcctctcgtttcggcttatcaccgagaccgcgggcacctacacctgcgtgctgggcaacgagacccacagcctggcgaccgagaccacggcgctggtggccgacgtgcacgacctgcgccactcggaccgctcctgcgacctagctttcggatctcgctcacagacgcggtacctgtggacgcccgatccctccaggttgcgcagtataaactgtggttgggagggtgaacggcaccgcgtggtccactacatccccggcacctcgggtctgctgccctcgtgcgaggaggacgagcgcgaactgtgcgtgcccttcatcagccagagcatcgcggacaacaactgcagccaccggcatcgggtagacggcgctaggcggcgctatcatctgcggagggattactggctgacggatccgaagatcgggctgctggccgcgggatcggtggccctgacctccctctgccacctgctgtgctactggtgttccgaatcgtaccggcgtctgaacaccgaagaggaaaacgaggcggcagaggaaactgccgcgggagaagcctctgcggtagcggcggcggccgtctctgaggaagagcagcagcgggagtaaacgaggagagccatgaagcggatgattcgcagtcacggcaggaaaacggaatgtcagatgacgggcgccggcgagcgacgcggctctgccgtcggtgcgctcatctgcggcagcggtacccgacgcggcagcggcgccaacgaacgccgcgactccgacgtcggtcccatcgcccacagtagcggtaccagacgcggttcggcgaatgaaacgtccgcctgtacgcggaccgatcaccagaaggcggacattgggctgtggttcatgtttctggtttttggactgtgttcgtggttggcgatgcggtatcgcgcacaataaattttgaatcgatgtcaaggaacgcgtgttttgtattttattgggaatattggcggggataaaccggtttcggatgtttacccttaatcttaccggggacctcgttgtcctctcctccttcttcctcggacacggggctccatgctgacgtaggtaccgactggggtcaaaagcctgggtacttatggggagcgcgcacaaaggaccgtcaggcgccggcatggagcgtcgccgaggtacggtaccgctgggatgggtgttttttgttctttgcttatctgcctcttccccgtgtgctgttgacctgggtagcaagtcctccaactcgacctgccgcttgaatgtgactgagttggcctcgatccatcctggggaaacgtggacgttacacgggatgtgtatttctatctgctactacgagaatgtgaccgaagacgagatcatcggcgtggcttttacttggcagcataacgagtctgtggttgacctgtggttgtaccagaacgacacggtgatccgcaatttcagcgacatcaccactaacatcttgcaagacggactgaaaatgcgaaccgtccctgtgactaaactgtacaccagccgcatggtcactaatcttaccgtgggccgctatgactgtttacgctgcgagaacggtacgatgaaaataatcgagcgcctctacgtccgattgggctcactatatccgagaccgcccggatccgggctcgccaaacacccctccgtaagcgccgacgaggaactgtccgcgaccttggcgagagacatcgtgttggtctcggccatcactctgttcttcttcttgttggccctacggatcccccagcgattgtgtcagcggctgcgcattcgcctgccgcatcgataccagcggttacgcaccgaggactgaacggataaccgcaaaggccacgtgcaacgttcacgctgctataagaaggccatgtcccccgtggacgggtctctttgacacgagcgcggcacgccgttgccacgagcatggatcacgcgctcttcacacacttcgtcggccggccccgtcactgtcggttggaaatgttgattctggacgaacaggtgtctaagagatcctgggacaccacggtttaccacaggcgccgcagacatctacctcgacgccgcgctccgtgcggcccccagaggcccgccgagattcccaaaagaagaaaaaaggcggccgtccttctattttggcacgatttgtgctggctgtttcgacgacttttctttcctcgggaggactcggagccactgatgtcggatccggcacggtctcccgaagaggaggagtaaacaacacacggctaagaggatacatcatcaaagaagataggaggggtcaaaacgcggactgaaagtatataacgccgatcatgtccgaggaactgttaataaaacgccatgatgacaacgtggtgtctgacgttgtttgtgctgtggatgttgagagtggtgggaatgcacgtgttgcgttacgggtacacggggattttcgatgatacatcgcatatgacgttgaccgtcgtggggatttttgacgggcaacacttttttacctatcacgttaattccagcgatagaacgtcaagtcgggccaacggtaccatttcttggatggccaacgtctcggcggcctaccccacctacctagacggggaaagagccaaaggtgaccttatttttaaccaaaccgagcaaaacctgttagagctggaaattgcgttgggttaccggtcacagagcgtgctgacgtggacgcacgagtgtaataccacggaaaacggtagttttgtagccggttacgagggatttgggtgggacggggaaactttaatggagctcaaggataacctgacactatggacgggccccaattacgaaattagttggttgaagcaaaacaaaacgtacatcgacggtaaaattaaaaacatcagcgagggggatactacaatacaaaggaactatctcaagggtaattgcactcaatggtccgtcatttatagcgggtttcaaacccccgtcacccacccagtggtaaagggcggtgtccgaaaccagaatgacaacagagctgaagcattctgtacatcttacgggttctttccaggggaaattaatattacttttattcattacggtgataaggtgcccgaggatagcgagcctcaatgcaatccgctacttcccaccttggatgggactttccatcagggatgttacgtagccatcttttgcaatcaaaactacacctgccgcgttacacacggtaattggacggtggaaatccccatcagcgttacctcacctgacgacagttcctcgggggaggtccccgatcacccgacagctaacaaacgctataacaccatgaccatcagcagtgtcctcctagccctgcttttatgcgctttgctattcgcgttcctgcactactttaccaccttgaaacaatacctacgtaacctggcctttgcgtggcgctatcgcaaggtccggtcgtcatgaccatcaacgccctgtatgagctgtttcgacgtcggttaccgcgtgcccccgtcaacacggtcatgtttctcacgcgacgcactcgtgatgggttctgcggtcggttgacgtccatcgccacgaattcccactacactatgttcgtgttggatcacgggtccgtgcgcatcgagcgaccgagtcagtcagaagtggattgcgccagtttaatggaaacgctgaagcggattcggttacgaaattcgtgggtagcgtcagaagacgagctagatgtgagtcgcagggacgcgtgacacgaaacgcgttcaggattaacgtaggttttcaaaataacctacgtccgtgagtgacgcggtttcgtgttgaaacccgcgcccggttcccacggtggtttatgatgaaaccggcgttggggatctacgcgggttcctcattcaacctgcgaaaagaggaagttgcggtaaaaccacgtcaataaagacgtcaatgacacctcaatgttgcgttggaacggtctttatatatacaaacgccgttatgctcagtgtccggcaagatgctcgggatacgggctatgctggtgatgctggattactactggatacagttgacaacgctcaatggcacccgaaccaacaataccgataccatctttgtgtctctccttaccggtcccaacggagttacccgcacggccatcgggggtttgtattcaaactacactaatttaactggaccatttggcttcacttcaacaaacgcatcaataaccaactcttccactgagggtaattggagcgtggctaatctgacagagagctgcatcaaccgcggtgagtcctatctgactaccctctggcttctgaactgcactcaaaacaatacttattggtattctggaaatgcttacaaccataccaatagcacctgtgaaaatcaagtttcgaaatatctcttttccggcatgtgccagctatggaaaaattggatcaatattacttttaataacactatcaaagtcgagttgctgggaaatgaaacacgctgcatgctgcttcctaaacagtatactctgaacgctacggtagaatggtacaacaaatctgaaggtaacgtaccaaaagaatttatggactatgttatcctgacccccttggcagtgcttacatgtggacttcaggaagcttatatagtcgacaagggtcgtagatacatgtatctgttctccgtgtcctgcgcgggaatcacaggtaccgtatctattatactcgtctccctatcgctgctcatcctcatctgttactatcgctgtggccggcttctgatatgcccacgcggctttgaactcttgccagaattcactgaggaagaggaggaaaaagaaaaattgttaacgcacaaggacattgaagtccaggtgcctatccgcacgcggcgactgctcgtcccttggatccgggagagcaaaatgtgggtactaccacccccgctgcctccacgacctccccacttaatagaattcccgccgtctcctccgccatcgcctggacccatgcacatggtggtctgcatgccagcatgacggactttggactctgagccccaagcggtacggactacatattttccataaatctacactgaacttgagcacaaaaatactgacaatggactggatatacagacttttatatgatccctgtacagatgtaaataaaatgcttttatttaaaactggtcccaatgttcttcgggaatcatgggatggggacgaggtacgcggtagggagcaaaaccgggcacatgggggggaacatcgtccagcagtagcaccagcggattgggcaggggctgttgcggaggtcggtcgatgacgatgtcgatctccatcggcagatccggtaacatctcttcgtctccctcaccgaccagcactcggcgctgttctggatgtatatgattctggaaaagcctccgacgagctcgcggcgcgtagaaagccaagcggcgcaagggccggcgagcccgaaagtccatgcgcacagatggcatgagtccttgagtgacggtggtgagctggggaacagggctacctcccatcgcgacggtgacagtggatccatgagagaggcgccgcacgctgcatggctaaataccgtgaatcccctgacgtcgtctttcgtcccgaacgcgtcatgttgggggcgaggcgtaaaccgtcgaggttgaaaaaccgcgtatctgcggttcgtccggactacgttgtttttcagaagcggccacatgacctcgagatgtcgtcacccaaggtatttaacggcacacagccagacgcgttcgtcagcagcgacgccgacaagacctcagcatggctcggaggctatggatactgagcttagccgtgaccttgacggtggctttggcggcaccttctcagaaatcgaagcgcaggtaaacaggtaagaaatacaaaaaataacgtgattgtgaacgcggttatcgtgtttttgcagcgtgacggtggaacaacccagtaccagcactaactccgatggtaataccacccccagcaagaacgtaactctcagtcaggggggatccaccaccgacggaaacgaagattactccggggaagagtatgacgttttgattacagacggagatggcagcgaacatcagcaaccacaagagaagaccgacgaacacaagggagaacacaccaaagaaaatgaaaagacccagtagcagcagatcccaagggttaaagaccatgttgactatcttgttttttattaaaaagctgtaaggttctgctctaaaaacaccccgcctccggtcttttttcttttgtattcggcacgcgaaacatggtttcttcccatagcctgtctaactagccttcccgtgagagtttatgaacatgtatctcaccagaatgctagtttgtagaggctatgcgggatgctgcggcggcgcgaccttccctctccacccagccccgtcaaaacacacgcgactcgagcggttcgtatgaaaaataaaaaacagctttttatttacaggaacggggaaaaaaaaggcacacggtccgtgggagacgcgggttcacgcgtcgtcaaaaagttggtggtccactccgtaaggacaggtaggcttatttagcttccgcatgctcctggttccgtaataaatgccgttttcgtggcagcgtgtcatgccgcgagtcacaaactccatcaaactgtcggccacgatgcaaacgtgctgattgttggcagcaaagacgcgcatacagtcgtccacgaagaggttgatcacgtcgtaggggcttaccaaccagcctaaaggttccacgtggttactgccgaccatgaccctccagtcgttaatctcgctccagtcgtacagccgaatcgtggagacgcgaatgacgctgtaatcacccatgaccatgagtcggccgcgatacgtagcacgccactgcgcgaacgcgtggatgtgcatgcagccggccagcgctctaagcgaggcggtgtgcggcagctcctctgggacggtgatgaagttgcagcgtcgcaaaccgatgttgagaaattcagtgatgctctcggccacaaaggtcaacgagtcagagtagatgtggtcggtccacaggtacatggcgcccgaggcgcccaggtacagttcagacggcacgttgtgatcgcccttgtgtttaagaaagttgtaggtgcagatgctgccgacgaaacgcagcggctcggggcagcagaggtagctggccagacgctgtgcatcccgtccttcgtcgcgcaccaagcgccagcgacgccggataacgaggcagcggtctttgggccagaccagggccacgcgttgcccgggtttccacggtcgcgacgtcttaggaggcctccagcggtcgagcagattgagaaaacagtccttgattaccgacatcgcggtcgcgcgtcggtggacaaaaagaaatcgggccgatccggaaaaaaaaaaaaacgacggcaaaacaccgccgtgctcgagcgaagggtggcggagggccagaagatgcggccttgacggcgttggcagcgaaaaaattggcacgcgagtcaaacgggaagtagcgtcggtgttttatgccccaagcagcgtcgtcgtcactcgtggcgtcacagtcaacggtgctgacgtcctttggggcagtcgggcacgcgatcgtagatgccgttgtggccgctgaaacgtcggttttcaaacagcaggttaagtcccagacacatgaacgtgttgagattatctcccacccggatgtagcggtcgtcgcgcacgtcgcaggcgtagacggccccggtataggcgacgacgatggggataaggtcgacgggccagcgcaagtgaggaaagggcgcgttctcgcccttgaggctgacggttcccaggccgagaacgcgcattccgaaagcggttttgatgttgcgcagcaagtgaccgccttccacgctgttttcgaaacacctgaggttgcatagacgcagttccgttcccggcgggtacgtcaacggcatgaactgcccgtggtggcggatgatgaatcgcgccatggtatccaaaccgaggctccaggcgcgcaacagcgggcgaaagtagcgcttaaccaacgacgaggtcaggtagcgcatgcagtgcagggtctcgacggcgcgcagcccgacgcgcgcaaactccatgaggttgcgggccaggtagtagacggcggtgtcctcgcgtacatagcaaaaaacatagccctcgtccgagatgaggcacacagcggtcttcttctgctgatccggcgacaacacgccctcgttcacgaagcgacccacgaaggccaggcgcgtctggcaacacaggtagtgactccaagccttcacgtcctccggtttgaagtcctcgtccgtctcgatctcctgcagcactaggttccagcccggcggccagaccacgggcaacacctggcctgcgttgatgcgcacgtaagcttccagacagcccaggccgaactcggccgtgagcgccaggctagccagatcgctcatgtgacgcgccgagtcagtgggcgagcccgggggcccgtcgcacaccacgctccgtcttcttgtcctcaccgcggccagcgtggcgaggacactttccgcgcccgaggctgtatcttcggtttgcccgccggagccggccctcactatataacgtcccgcccgggtctcctccatgtatgcaggtaagcaactgagccgaacgcacctcagcagacgagaggatgtcgtcgcggcgtcgcagctcgtcacgtcgctctggcgaaccctcgacggtgatttatatcccctcgagcaacgaggacacgccggcggatgaggaggcggaggacagcgttttcacgagcacgcgggcgcgcagcgccacggaagatctggatcgcatggaggccggtttgtcgccctacagcgtctcctcggacgctccgtcgtccttcgagctcgtgcgcgagaccggcggcaccggcgccgccaagaaaccgagcgaaaagaaacgatcgtcgtcgcgtcggcaaccgcagatcgcagcgggcgcgcctcggggctcgccggcgacacccaaggccggcaagtcgcctaaagtctcgcgaccgcctagtgtgccctcgctgcccgagaacggcgccggcggcggtggcgacgataacagcagcagcggcggtagcagcagtcgcaccaccagtaacagtagcagaagtaccagtcccgtggcgccaggtgagccgtccgctgccgagggcgatgagttttccttctgcgacagcgacatcgaagactttgagcgcgaatgttaccgggtcagcgtggccgacaatctgggcttcgagcccagcgtggtcgcgccgcagcacgtcgagtatctcaaattcgtgctgcaagactttgacgtgcagcacctccgccgcctcaacgaatgcatacccatgccggccttcgcgctcaccagcctcgtcgaccccgtcttaaacaacgtagcgcctggcgagcgcgatctcacgcgtcggataatcacgcacgcggtgatcatcaactattactacgtggcgcaaaagaaagcgcgccacatggtggaggccatacggaccaccgtgcggggcgacacggtacgccaggtagccgcgcaggtcaacaaccagagccgttcggggcgtgcggccgcgctagcgcttcactttctcacgtcacgaaaaggagtgacggacggccagtacgccacgtctctgcggcggctggacgaagagctgcggcatcgcggcacgcccgaatcgccgcggctcaccgaggtctaccagacgctacgcgattacaacgtgctcttctataccgcccactacacctcgcgcggcgcgctctacctctatcgacaaaacctgcagcggctcaacgagaaccaccggggcatgctccggctgctttcggtcgaagagatatgcgaagagcacacgctcaacgatctggcgttcctagtaggcgtcgagcttatgatcacgcactttcaacgcaccattcgcgtgctgcgctgctatctccagcaccagctgcagagcatctcggagctgtgttacctcatctatgtacaactgccgtcgctgcgcgaagactacgcgcagctcagtgacgtgctctactgggccgtcagtcaaaactacgactacgcgctctacgcgagcacgccggcgttgtttgactttttacgcgtcgtgcgtcagcaggacgccttcatttgcaccgactacgtgtattgcgccctgcgcctgctggcctgtcccgaccgacctattatcggtgacaccggcggcagcagtagctcccaacgcctcgtaggtgagtttatggtgcgcgatccgctgttgcgcgacccgcgcgccacccacctgcgccagaaactcatcacccgagacatatgcgtggcgcggttgcaagcgcagccctcgagtcgacacattccggtcgaacacacgggtgtctcctccgtcaccctgctcaaaatctttagccaggtcccccccgacgaacgcgaagaagacacgttacgcgagatggctcttaaagcgtttatggaagcgaacggtaatcaccccgaacaaatctgccgatccccaccacccccgctgccgccgcgcgactatcctcaacgcgacgagcgggaccgtcaccgtcgcgaccgccgcgacagcggggaatactgttgctgatggtggaacgaagcagcagggcggaacggtttatgataaaaagtcacaggaaagtatgtgttgttttttaatgtaccaagaataaaaaatgcgtctacgaccaaagcggtgtgtggacgctcgtcctctctgtcttctccgggttttttttttcatgtttttttttcttcctattttgttacggcaacagcgctgatggcacgttgccggcttcgaacatcgcgtcggtgatttcttgcttgcccggcgtcacacggtgacgtagcagcgcgcggctcacgtagcaggctgactcgcggatgacctggccgtcggcgtcgcgtcgcaggcccgagcgtttgccgtgacgcagtctgccctgcgcagcgcgctccacgtcttcaaagtagctgtgtagcaggccgcgctccagcagctgcggcagcgagtcggcggcgcgcaccacaaagttctcacggctgatctcgtagcacagcacgctgccgtcggccgccacgccggccacgctgcggtcccaactgaaaaggttggcgagtccgatggtgccgatgacgcgcaactgaccctgggtcaccaccagcagcttccagtattctacgtcgcgcggggtgaggatggtctcctccacgtcgcagacaaacagcgtgtagccgcgcggatagggcagatccaggtggcgaccgcgctggcggcgcataaaatcgtctaaattcaaaccgccgtcgggtgcgcgcctgctcgtcatcgccgcgcctcgtcggtcgatgaccccacggtgcttataacgcgccgccacggcttcatgtggcgtgacctccgacctcgtgaggccgaaaacggcgtacatgaagacgctcaaacttttgaatgtgggcccggtagcgcaccgagggccccggggcggcgacgacggcgggtccgagttccagcggggccttgcggcggcagcggttagcctggttgctcagctcggcgtccgagagcgccgagctgaactgcggcagccgcgtgcgatcctgcggcgcgtccccgtgtcgcagcgagtgccagagcaggcgctggacgcgcgccgtctcgggcgtcggcggcgcgcgacagccccggcgcagcttgaaaacgtgcaggcacaacagctcgcgcttgatgcgcagcgacacgctgcggtagtcgggaatccgctgcaccagctcgagaaagtcgcagaaggtctccacgaacgtgtcctcggtgaagcgaatgcgcttcagatcgtggacgtgtttgcgaaaccgcgacagttctcgacgttgcacggggttctgagcgagtcccttgcgcagcagcgcagcctcgcctttaaacagcctgatgagccgctgcacgtccccgctcaacatacgtatacacgccgtgtactcgtgacgtatactggcgcgcagcagccgaatgatacgcagggccagcacggcgttggaggccaggtacatggcgtagccgcgacgcgggttggcacaggcccagcccgcggggagcagaaagtagtcgtcgaccagcgtctgcgaccagtcggcgaagcccaggtcacgtgatacgctgtcctggacgcgggccacgtcgccggccgtgaggtggcggatcgccggcaggtgaaacgcgcccaggtgtcggttgcgctccagtctcagctcggcgtgctccaaacgggaatggtgggacgccaccgcggagggcgacaaagaggagtggtcattgccgccgtggttaccgttgtggttaccgccgttgtcgcgcccgtcgccgcactcgcaaaaggccgcgtagaggtccttcaacgccgcttcggctcgcgccataaacgtggcgtggaaaaaaacggcggcgcggtgcgtccggtacttgacgggcaacccgcggcacagggccgccggcaggcagcggccgatgagttcgcgctcctcgggctccagaaacaggcacagggtgccgtccaggcgcaggtacagctcctcggtcatcgagcatagctgccgcaaataatgggtgcgcgtcccaaaggtcttgtaatcgagcaacgtgcacaccacgtattgccccgtggccacggccagagcgatgcgtttggcggcgcgactgatctctggcaagtactgcgcctcgtgcaccagacggcggaaagcgccggcgttgagccagcgaaaatgctgcggatcgggcggcaagggcacgcctcgaagcgcggcccagacggcgaggtccgactcgagcgtcagaccgcggatgtcgtacttgccgtgcgccgtagcgcaggccgaatggaccagacagctgcggcgaatgtacaccatggcgtgcttgggatgtttgggcgccggcgttttctttttctgaccgccggcggccgccagatcctcgggcgtgcgacacaacaggccggcgcgcacagcctcctgtcgattacgaatcggcgtcaggtaggcgcgcaggaactggtgacaaaactcctcatcatcacgacagtcgtcgagatactcgtacgtggtgagcggatcacgaaataggcgctcgtcaccgtcgtcatggtcttctttagcctgctcctccggctgctgggttggcagtggaggcggcggctgatccacggggttcatgactgagaggaagaagaaggtggcggcgaagcgacgcggagcgacggcggtaaagccaaacaccggctatatagctagtcatcacagtctcctccttcacgacgcccccgtgccgctcacgctatccagcacgctacggcccgaaaacacgtactcgctgacgtcgtacgcgggcgatgtatggctgctcaccggtttcgcggcgacggttgcgctcgagtccaacggcgagaagcaaaaacgccgtgggcaacgaaaccagaaggagccctgacggataaaaccgcgcagcgtctcggccaacttaaccagcatcgtaccgtacagcagtacgtgaatgccgccgtgcgcgtccataaatacggctttgttcacgggctccatccatccgatgactacaaagtgggcctgttctagcacgccgatcacaaaattgttggcctcgtcggcctcggccacgttccacgagccgaaagtgaaagtacaagcgggcgagccgcccaggcggatcttgctaccggcgtggagctgacatacgcgcagcagattggtgcggtcgtgcagtatctgggagagttcgtacatgcccgcaaaggtgtgcttaaaccacgcgccctctacgatttcatccacgtagtcgcgctcaaagaagctgtacacggcaaagaggccgttctcaaaaaactcgccgaacgagagccccagtacgtacaccttgtcctcgccgggcaggtacgcaaaggcgtgcccgtgcccggagacccagatctcgggcgccgtgtttgcgtccggcacgcattcgtacacactgacgaggccgataaagtacaagcggccagcctggcgcaggcacgagaagcgccggtaggtcttgtgatcgcgcaccaccccaaagtactgagtgtcgcccagcatgatgccgtgcagcggcggccagcacagcgggagccaacgacccgccgtggcgcgcacgtagcgctgcaggtgaaccccgctcgcacgctcgcgcggcttcgggcgcttgtgggtccaggcatcacgcagaccgcgccagatgctgctgaacttgggctgcccgcgcagatagagcgacgagagcgagtcaaagtagcccacgacgagcctgtcgggagacacaagagcgcgaaaatcaaacctagagcgacgacggtgaaaaaaccgaccagaagcgcgtgtctcaaacacgctactttcggttataaaaacaccgtcgccctatttctgggcgtgtgtacactgatgactcacctacgctttttgaacggcagtctcagctcgggattggcctcgtacagcgagctgcggtccacggggccgatactctcgtagcgaaagtcgtcgatgagcagcgccagccccacgcgcacgaagcccctgaggtcgcgcgccagccgcaccaacttatcctgccccaccagcgccgcgtacacggtgcccgtgtcgccgcagagaatccgcacgcggtgaaagaaggtcttgtcctcggcgccctcaatttcgcccagcggcatgacgggctcgcgcgtgtacaacgaacgttgaaagcggcgcagcatcgaggccgagagccccagatcgcgcgccgtgcgcagcactagggaatgcttctcgggccagatgagggtcagttgcgcctcgcggtgcgcctctacgtaggcgcagcgagcggcggtgtcctcgcaggccagcaactcgcggaaagccagcaacgaacgtaggtagcgaccgcgagcggaggcgcgcgagcggcggcacagctcggcccgatggtcgggatgcaccaagggcacgttgggttgcagacgcgcgcagatggattcgtgcaccgggtcgcagcggatcatgcccttggcaaaaaatccggccagatccgaggccaactcgtacaggcagtcctcttgcgcgtcgtaggcgaacacggcgccgtacgcgtccacgaacacctggtaccggcaggtggcgtgcgagaccgtgccaatgagatgcagagctcggaattcgccgaaaaagtcgttctggcagtgctccagatcgatctcggtcagcgagtgcggcgaatgctcgcccccgaccacgtagatgcactgcgagggccagcccagcgatacgcacgagccctcgaagcgccgcaaataacgccgcaggccctcatagtcgcgtcgcacgcacagatcggccaagtcgcgcgtgcaaaagacctcgggtaccaagcagcgtttgcgacgcggccgacgcgcgtgcccgggcagaggaggaaggcgcgacggcggcgacgacgaggaggaagacgccgtggccgccgagcagcccttgcgacggccggacatgccggcagtccgcgacgatccacaggagacaaaaaagcagaagcagcagtagtctcggcgacccgctccaccccgtcctccacacgctcagccgcgactgagcgccggggcgcgccgctacttgggtttttatagccatctgccccccgtctcgggcacccgggagcgatctacggagacctgacagcagttgggcaacacaagacagggaaatacaaagacacttttaataaaaaacgagactactttgtgtgtgtgctccgtaaactgtttattctccccctccgtctcgctctggatgggctccgggtccgtcaacacgcgacccgcgcggcaaaaggcacgctgttgacggcgcgagagcccgtcgtgatagtccatcatgccccggagatcgtgcacaaagcagctgtcgccgcgcagaaaccgacgcagcgtctccacgtgctgcagctgtcggcgcgtatcaggagccgtcatcgccgatgtcgtcatctccctgacaggcgcgtagatggctccgcgagatcatgcgcgttttcaaccgccgtgacacatcaggtccatcttgagctggcgccgggcctcgcgcaggtctcgcacgcgttgtgagcgggaggcgagttcggcttcttgctcgaactcctgctgctcactgtccgagagggtgcgataaaaggcggcaaagtcctccaagtcggctacatgcgccctgggtctgacgctccaaagcgtacgcagtctgatgaagcggacccatcgagcgtcacggcacgccgtcttgaacgcggggcccgggaagaggttcttctccccggcgcgctcgggccggcgaggccgacgcggtttatatacaccgtctcggacggcgggacgccgagcccgcgccgcggccgctcatccggagacggcggaaaccgcggcgccggaggaaacggggaccggcaacgacggcggcggcgaccagattatgggggacaagcccacgcttgtgaccctgttgaccgtcgccgtgtcgtcgccgccaccgtcgtcgccgctgccgctcgtcagcttcacggagctgctgttaccgccgccgtccgtcgccgccgctgcggtggcggcaacagcgacgagcgaggtgggcgagaaaaccgcggagcaagaggtagcggctgcgggtccggagaccgggaatgagagaagagaaaacagggaggacgaaggaggggagacgaggacgacgggcaccaccgcggtcaaaaggtcgcacgacggtatccctcgccaactggcagagcgcctgcggctgtgccgccacatggaccccgagcaggactatcgtctgccggcgcaggacgtggtgacctcgtggatcgaagcgctacgcgacgcggaccgcgacaactacggtcgctgcgtgcgccacgccaagattcaccgttcggcctcgcacctgacggcctacgagtcgtacttggtgtccatcaccgagcagtacaacacggcctcgaacgtgacggagaaagcttcgtacgtgcagggctgcatctttctctcgtttcccgtcatttacaacaacacgcagggctgcggctacaagtacgactggtccaacgtggtgacgcccaaggcggcgtacgccgagctcttctttctgctctgctccaccagcgagagttccgtggtgctgcaaccgctcatcaccaagggcgggctctgctcgtccatggcggtttacgacgaggaaaccatgcggcagtcgcaggcggtgcagatcggttttctgcacacacaactggtcatggtgcccttcgtgccgcacgcctgcccgcattacgccgtgcctttcacgacgccgggaaagccgggctgcggcggtgctccgagcggcgttgcggggttggaggaggcggcgccctttggacgggtcagcgtcacgcggcatggcgcgacgctgctgtgtcgcgtggaccatctgacctggatcagtaagcgcgtaaccacgtacggacacaaaaaaattacgcgctacctcgcgcagttccgcggcacgatggacgacgacgaggcggcgctacccggcgaggacgaggcgtggatcgcgtccaaaaacgtgcagtacgaattcatgggtctcattttcaccgtcaacgtggattcactatgcgtggacgcggaacagcgccaactgctgggcaccgtggccacctccttctgtcaccgcgtctcggacaagatcacggcgcgcaacatgccgcgcgccttttccttctacttgctaacgagcgcgcagcgcgggtacgacctgcgatttagccgcaacccgtcactcttttttagcggcgacgcgctcaactgtccgcttctcaacgagcccaacgtgttttcgctcacggtgcacgcgccttacgatatccacttcggggtgcaaccgcggcagacggtggagttggacttgcgctacgtgcagatcacagaccggtgtttcttggtggccaacttgccacacgaggacgccttttacacagggcttagcgtgtggcgcggcggcgagccgctcaaagtcacgctgtggacgcgcacgcgttccatcgtgatcccgcagggcactcccatcgccacgttgtatcaaatcaccgagggcgacggtaacgtgtactcgtacaatcaccacacggtgtttcggcagatgcacgccgccggagcaaccacgttctttctgggcgacatgcaattgcccgcggacaactttctcacgtctccccatccctgaccctccgtccgtcctcctttcccgacacgtcactatccgatggtttcattaaaaagtacgtctgcgtgtgtgtttattaactattcctccgtgttcttaatcttctcgatcttttggaggatgttctgcacggcgtccgacggcgttttggcgccccccatgccggcagaacccggttgcggccccgtaccgctcttctggggcgacgataggtcgaaagccaccgttttcatgcccgtcgtgctcttgacgggggaacctacggcggcggtccccgtcgagcggcgtgattgcaaagccgcgctcgcccccggtttcaggatggagggggaggccacaggcggcgcattcgatacgctgcttttggccgtagacgacggtgggtaaacggtggttaccgcgggatacgtcggcgtggtcgaggcggcccggctggtgccggacaggcgacccggcgcgctaccgctcacggggaccgagggcggtcgacctaccaccgccttgccgcccaaagtaggtttcaaagaaggaacaccgacgcggctgccccgacctttcaccggagacggaggggcactcttggccggggacggagaggctgacgaaagcatggacagcggcgacgtgacgggggacacgacatcatcctccgtgggcgacaaaacggacgccgaggctgacggctgtcgagccgaagcggaagaggttctcgcgccagaagtcacgttccttgatgacgttgttttagacgaagccggttgaggttgcaacagcgtggcgggtaccgtcgacggcgtgcccgatacctgtttctctacccttccctgaaccggtgtcgacgtcaccgtctgcgctcgggcggacgcgtgcggcgtcgcgactcgcttgcccagcaccggtttctggctcgtggatgtcgtcgtcattggagacgataacttagctttacgtattctggacggcgtcgactgctcgggcgtctgactgggaggcgaaatgacgtcgttgtaatcggacgacggtgttgtgtgtcccaggctgacgacggagccggtgtccgaggagtcgtcgtcttcctcctcgctgtcttcgaccggtgactctgcagtttggtcccttaaagcccaaacctcatcagcggcgttctgagacgctgtttgtgtcaccgcggcgcgtggagtcgacggcctccgaggggtggtggacacgttgttttgagaagtcgtggaagtcgtaggcatcctgaagggattgtaagccaggtgaggattcttgagggcccacgcgcgttcgcgcggccagttggcggggttcatatcccataagcgctaacttaagggttgtggtattacgcctgatatgatttaacgtgccgatgaattactctcacgataactggtcagcaattctggcccatattggtaagcccgaagaactggatacttcggcacgtaatgccggggctctaacccgccgccgcgaaattcgtgatgctgcaactctgctacgtctggggctggcttacggccccggggggatgtcattacgtgaagtcactgcatgggctcagctccatgacgttgcaacattatctgacgtggctctcctgaagcggctgcggaatgccgccgactggtttggcatacttgccgcacaaacacttgctgtacgcgccgcagttacgggttgtacaagcggaaagagattgcgtcttgtcgatggaacagcaatcagtgcgcccgggggcggcagcgctgaatggcgactacatatgggatatgatcctcatacctgtcagttcactgattttgagctaaccgacagcagagacgctgaacggctggaccgatttgcgcaaacggcagacgagatacgcattgctgaccggggattcggttcgcgtcccgaatgtatccgctcacttgcttttggagaagctgattatatcgtccgggttcactggcgaggattgcgctggttaactgcagaaggaatgcgctttgacatgatgggttttctgcgcgggctggattgcggtaagaacggtgaaaccactgtaatgataggcaattcaggtaataaaaaagccggagctccctttccggcacgtctcattgccgtatcacttcctcccgaaaaagcattaatcagtaaaacccgactgctcagcgagaatcgtcgaaaaggacgagtagttcaggcggaaacgctggaagcagcgggccatgtgctattgctaacatcattaccggaagatgaatattcagcagagcaagtggctgattgttaccgtctgcgatggcaaattgaactggcttttaagcggctcaaaagtttgctgcacctggatgctttgcgtgcaaaggaacctgaactcgcgaaagcgtggatatttgctaatctactcgccgcatttttaattgacgacataatccagccatcgctggatttcccccccagaagtgccggatccgaaaagaagaactaactcgttgtggagaataacaaaaatggtcatctggagcttacaggtggccattcgtgggacagtatccctgacagcctacaaaacgcaattgaagaacgcgaggcatcgtcttaacgaggcaccgaggcgtcgcattcttcagatggttcaacccttaagttagcgcttatgggttcatatccccgggcaacggcgccgtcggagcccagggcgagttaccgttgaccggggtttgggtacccgcgaaggtaggtgtcggggccggagcgggggccgtggaaggattgacaggcgtcggcgtgaggatggcagcgccggcgccagcagggacgttaactccggcgccgaacgtcaacgtcggttgctcgaacttgtacgcggtggtgacgggcggtttggcgctcgtctcggtatccgtgatgtccaccggcgtgtcggtgaaacgcggatcttgacggttggggggatagccatccgagctgtcggaatcctcgtcgcccgagaaaagatcccctcttgtctccgtgagcggcctcacgtcccacgcgctgtcccgacggacccttcccgggctggccttggttacctgcggggagacgagactgaaagccgcgtgacgctgttgttgctgcgggatgttcaagggaccgctggtcggtttctgactgcccgaggataacatgccgctgaaaatgctggaaacaccgttgccactagcggcgcccttgccgctagttcccggtttcttgatgggcgtaaagatgtttttctcgtcatcatcatcgtcgtcgtcctcatcggcactggagccaaagagcctccgggaggcgcccggtttacgtgtcgggggcggcggttgctgctgacgttgctgcaggttctgctgcctctcctcccaagccttcagctgctgtttctcacgctgcaccacctcgtcgtccacccgtttctgccgctcgcgacgcttttcctcttcgtcgtaatagccgacggccgccgaacgggcggcgtgggcgtcggcggccggtgccagagaaccatgggcctcgaagcggaacggtttgtgtcccttccagggactggcgatccagctccagccgtccagcggctgcgtggggacatgtttcttgggtaccgacgagaaggctgaaccgccgccgagcgagaggagattggcgtcatcgtcaaactccaacgacggcgggcgcgcgcccaaaaaggtgtgcgccgactgcgggaagctgtccacgtagatgtcaaagtcctcgatgagcagctccagcagcgtgtcggccgagtcaccgttttccacggcgtgtttgaggatattgcgacagtagttggaatcaaaggaaaggcacatgcgcagctccttgaccagcagcttgcagcgctcctgaatgcgcgccagacatttgcgctccagctcctcccaagacctgcgcacgttcatgatgagacggcccgtgtacacgagcttgttgacggcgttgaccagcgccgtgttggcgtgccggtccaggttaaggtcgagcggtttcacgcagaacatgttacggcgcacaccctccaggttttcttcaatgcgctgcacctccgtatccttgaggtgcacaaaagcgatgggttccgtctggccgatggctgtgaccagcgtctcgcgcaccgacatcttggccagaatgaccgcgcttacgagcgcgcgctccacaatctcagcatcgtggcgtacgtccgtatcgaattcggtacggtctagcacagccaggtggtcacgcgccttaccacgatcaccgaacgggtaagtgtagccgcgacgcgccacggccgcgcaacgcacctcgaactcctcgagaaccgaggagaggtcggggttgtggaaacgcagctcgcggtagtatcccaaccaaagcatgagctcgttgaacagcaccgtacgccggtgcaggcgtttttcgccacattttttcaggatcttggggtgtgcctcgagatccacgtcgggcttttgcgtgagatggcgcagaaagttgaccagggccaccacatcgcgccgctgtagaccgataaactgcaaactcatgctggcttttctccagaacccggaagcgtcgtcgccccggactgcgcccgcggtctgctattcgtccacgatggacaccatcatccacaacaccacggtgagcgccccacctagagggagggggggtagtttaatagcggaggcggatacgcggttttcactctggcaccgctgacttgtttcttttgttttttgctccgtgtgcttgttccgcctagaaccgcagtaccagtactccgcatgtcaacagtacctgtaacatgacggagacgctatccgccatccgcactacagaagccgtgatcaacacgttcatcattttcgtgggcggcccgctcaatgccatagtgttggtcacgcagctgctcacgaaccgtgtattgggctattcgacacccaccatctacatgaccaacctctattccactaattttctcacgctcaccgtgctgcccttcatcgtgttgagcaaccagtggctactacccgctagcgtgacttcgtgcaaattcttgtcggtaatttattactcaagctgcacagtgggctttgccaccgtagccctgatcgccgccgaccgataccgtgttcttcataagcgtacctacgcgcggcagtcgtatcgctctacctatataattttgctattgacttggtttgccgggctgatcttttccatgcccgcggccgtttacactacagtagtgatacataatggtacagatgagaataccaatgggcacgctacctgcgtactgtacttcatagccgacgaggtgtacacggtactactctcgtggaaagtgctgctgacgctagtgtggggcgccgcgcccgttatcatgatgacgtggttctacgccttcttctattcaaccgtacagcgcgcatctcagaaacaaaggagtcgcactttaaccttcgtcagcgtgttactcatctccttcgtggcgctacagacgccttacgtgtccatcatgattttcaacagttacgccacggccgcatggcccatggactgcgaacacctgacactgcgacgcaccattggcacgctgtcacgtctggtaccccacctacactgcctcatcaatcccattctgtacgcgctgctgggtcatgactttttgcagcgcatgcggcagtgtttccgcggccagttgctggaccgccgcgctttcctgagatcgcagcagaatcagcgagctacagcggagacaaatctagcggctggcaacaattcacaatcagtggctacgtcattagacaccaatagcaaaaactgcaatcagcacgccaaacgaagcgtgtctttcaattttcccagcggtacgtggaaaggcggtcagaaaaccgcgtccaacgacacatccacaaaaatcccccatcgactctcacaatcgcatcataacctcagcggggtatgagctttcctgttactttattcagaaagcaccagaacccgtcgccatttcccctcatatacggtacacgtccccctgatctgtcatcacggtacacagatttcgcccgactgcggacaccgacggccaatcgcgtggcgtaggagtggcgccccggcttcattataacgccacgtcggagcccctgcgcgccacaacgccgtccggcgcaacttctgtctcggcacggtacgataaaaacgacgtcccccgtcgacgttgttttctccgagcggtgatcgttcccgtccctctcctccctccgcggcccccacggcggcggcccgctcgcacggacctatactattaccgccccaccgccgtcgtcgtcatgaacttcatcatcaccacccgagacttctccaacgacgattcagtcctgcgagccgccgagatgcgtgacaacgtggcaggctcgatttccaaagcgtacaagggtacggtacgcgccgaaggcaagaagaagctgctgctgaagcacttgcccgtgccgcccggcggctgctcgcgccgcaacagcaacctcttcgttttctgcaccgagcgcgactaccgcaagttccaccagggcatcgcacagctcaagcgcgcgccggccgaactggacccccacgagatccagcaagtcacggccagtatccgctgccgcctgcagcccagtctccgcgagccgcccacgccggccgacgagctgcagacggctgtgtcgcgcgtgtgcgcgctcttcaaccagttggttttcacggcccagctgcgccactactgcgagcaccaggacaaggtggtgagctacgcgcgcgacgagctgactaaacgctgcggcgaaaaatcggcgctgggcgtggaggtgcatcaactggtagccctgctgccacacgagcgccaccgcgaactgtgccacgtcctcatcggcttgttgcaccagacgccgcacatgtgggcgcgctccatccgtctcatcggacacctgcgccactacctgcagaacagcttcctacacctgttgatgaactcaggtttggatatcgcgcaagtcttcgacggctgttaccacagcgaggcctaccgcatgctcttccagatcggtcatacggactcggtgtcggcggccctggaactttcacacagcgcggcggccgggccgcccgaggccgatgagaacaacgacgaaggagaggaggacgacgacgagctccgtcacagcgacccggcgccgcttcacgagtccaagaagccccgcaacgcccgtcgtccccgcacacgcgtgccgcctcacgagcaaaagcccgaagaaaacgaggaggaagaagaggagctgtttccctcctgcaaggcaaccgcagcattcctgcgggcagaaccctccgtctccaacgacgacggcaacggcggcgaacgctgcgacacgctagcgaccgccctgcggcattgcgccgacgaagaagacggacctctagccagccagaccgctgtgcgggtcgccgcgaccccctcaccttcagtcaccccagcccttacccccgtcacgtcccccataaccccgttgtgtatttaacgtcactggagaacaataaagcgttgatttctcaagttccgctctggttttggtttcgttttcaaagggagccccatcatggcccaaggatcgcgagccccatcgggcccgccactgcccgttctccccgtggacgactggctcaactttcgggttgacctgtttggggacgagcaccggcgcctgctgctcgaaatgttgacccagggctgctccaactttgtggggctgctcaactttggcgtgcccagccccgtatacgcgctggaggccctggtggacttccaggtgcgcaacgcttttatgaaggtaaagcccgtggcccaggagattatccgtatctgcatcctcgctaaccactaccgcaacagccgcgatgtgttgcgggacctgcgcacgcagctcgacgtgctgtactcggagccgcttaagacgcggctgcttagagggctcatccgactctgccgcgctgcgcaaaccggcgtcaagcccgaggacatcagcgtgcacctgggcgccgacgatgtgacattcggcgtgctaaaacgagcgctggtccggttgcaccgggtacgcgacgcgctggggctgcgcgcgtctcccgaggccgaggcacgctatccgcgcctcaccacctataacctgctgttccacccaccgcccttcaccacggtcgaggcggtggatctgtgcgccgagaacctgtccgacgtaacacaacgtcgtaaccgaccgttgcgctgcctcacctccatcaaacgcccgggctcacgcaccctggaggacgcgctaaacgacatgtatctgttgttgacgctgcgacacttacagctgcgacacgcgctggagctacaaatgatgcaggactgggtggtggaacgctgcaaccgtctttgcgacgcgctttacttttgttacacgcaagcccccgaaacgcggcagactttcgtcacgctggtgcgtgggctggaacttgcgcggcaacacagcagtccggccttccagccgatgctgtacaatctgttgcaactactgacgcagctgcacgaggccaacgtgtacctctgcccgggatatttacatttcagcgcgtacaagctgctaaaaaagatccaatcggtctcggacgcccgcgagcgcggcgagttcggggacgaggacgaagagcaggagaacgacggcgagccgcgtgaggcccagctcgatctcgaagccgatcccacagcgcgcgagggcgagctctttttcttctccaagaacctgtacggcaacggcgaggttttccgcgtgcccgagcaacccagccgctacctgcgtcgacgtatgttcgtggaacggcctgaaaccctgcagatcttctataacttccacgaaggcaagatcaccaccgagacgtatcacctccagcgcatctatagcatgatgatcgagggcgcctctcggcagacgggcctgacacccaagcgcttcatggaactcattgacagagcacctctgggccaggagtcggaacccgagatcacagaacatcgcgatttatttgccgatgtttttcgccgtcctgtgaccgacgcagcttcttcgtcgtccgcgtcttcgtcgtcgtcctcagcatctccgaattctgtttcgctgccgtccgccaggtcgtcatccacacgaaccaccacgcccgcgtccacgtacacctcggccgggacttctaccacgggcctcttgctctcctcttcttccttgtcggggtcgcacggcattagctccgcggacctggagcagccgccccggcaacgacgccgcatggtcagcgtaaccctcttttcgccctactcggtagcctacagccaccaccgacgtcaccgaagacgacgcagcccgccacccgcaccccgagggccggcccacacacgtttccagggacccgacagcatgccgagcactagctacggcagcgacgtcgaagacccgcgggacgatttggccgaaaatctacggcatctctaaacgcggttttcctctttttatacgtgtctgtctcaggacgagacgttgatatcaataaaaataccgtcaacgtggttttctaacagtgtggttttctttattgaccagcggagtacacagtttacgagtaaaaaagacagggaaaggttatataaaatgctgtgttatatacaaaaacatgcacataaacaaacgggaccaccgtgctcgtcatcctctcctcaatcagttgttcatgtaggcgtgtggcggggtgaggggcggcatgccgttggcggcgccgggaataatgtgtcgtcgaccggcgtcgcacaccttgaaacgccgtcggcgcacgcagcggtcgcaggacgggatatcccagaggaagcccatataggtctcggggtcctcgtcgtgaaagcggtaagagagttcaaggtggtgcaatgagcccgtccgagctcgcagcttctggcgaacaccctccacgtcatcggtgcacagcgacagtgctgggctgtcacacagggcctgaagctcctgcggccacaggtgcgtggccaggggcgagtccgtcgtcaccagtttgacgcagtgcatcaggttctcggtgatggcgtcgtacaggcgactctcagcctcctcgtgcgtcatcacgttccgaggcagcgacagctcgtcgtcgtcatcctcgtcaaacatgatcatggggtcaggggtttttttgggatgttgacaggtgggtgtcttttccagacgcacgatggcctcacgccggctgctgaaacggtggtttcggtgtcccttctttcccatgacgcaggtgaacataaccacgtcctcggccagacggtagacggcgtccatggcggggtcgtagccgtagacgacgccgaaagtgtccaccaagacgtactggcgtacgagaaactctttgcgttctggcacctcgtggcccagcgcgcccaacagctggtgataacaggtgatgcgcggcacggtacggatcatgagctccatggtctggatgctgccgcccgcgcggacaacgctgaaggatgtttccttgaacttcataacctctgtgttgtgggtccagaaggcgaaatgggtgtcgggacactcatcgaaagggtcgtcgatgctgtaggaagcgtagccccgcttggtcacctcggccgacaggctctccacgtcaccgcggtagagcatgacggcgttccagtagtcgtcgtactgcaccatgggccgctggtagtcgcgcatagtgtggaagtggtcgcagtgacgaaagccatgccgcagaaagtccttcatggtggccgccagctcgtagacgcagtcacgcagatcatcgtagcagtagatgccgccgcgctgcccgatgagcacgatgagttggtagcgcataaagcccggaccctcgacgaagccaaaggggtgcaggtattcctgacagcagacgtaagcacctggtggagaaataagaaaaatccacacacgttgaaaacacctggaaagaacgtgcccgagcgaacgtcctctttccaggtgtcttcaacgacgtggggcttaccttgcgaacagacggtgcccatcttgcccacgaagggccccagggcgctgcgcgaacggagctggatgaagcagcgttcgggccaggccacgtgcagccgggtgccgcattcctgctccagaaagtcgttgagaccgttaaagtccccggctcggatggcgatgcagccgtaggccatcaacgtgtcccgtaggtcgtccatgacggactcctctaccttcgctcgccgacgctgcgcttctccagccaccgctgcggtcgacagactcctccgtccgccttcggagaactacggcgcggcggcacggcctttatagacactatcagcgttgacgtcagacgatccgatgaacgtcgttttttgtgctggaacttccctcgtcccgacaaatgtagcggaaatcttcaagcaaatcgcgacgaagtccgatgaggaggatgcaaaagaggctgagcaacgcgatgctgcccgccgccacagtacatatgctcaacaacgcccagtgtcccaacgcgcgacttttggctcggaggagagccgaacggcggtttttccacatgatggataacgtagtccaatacctccatccttcgcattccgatgtccacatgggaagcgatgtcatgttagttcccgtaaacgttgtgttttttttattgtttttcgtaagcttaacgctcctcttgagaaatcgcggacacatgtcttgtagaaaaatataatcactttccgcatataccgttaagattgacatcacagtgatggtgttgttttctgaagaagtcacgttatcggtgacgttggtttcctcccaatttacggatgactcaaacggactcgtgcgcgccagtgctcgcaatacgtaactgcggccggtaaggttaagcgtcagctgtcccatggtaatattagtgtcatttgtaaaacacgcaacctccccgtagacctcggtgacgttgatatcgcggctctcgttcaggatgcgcaggggaaaccagccttccaggtggtactgaaaaccaaacgtgagcatgacgctgtgccactgccgacgtgattgccgaaacgttacgtttaaaggcagttttgattcggctccggcgcaggggccgttgtagatttgcgtatgattgcacgtgcagtttaaccggcagttcatactcgtggcgttggaagtgacgttaatgtccgtaccgtggtacgtacatcggacagaaacaccgtatcccgtgctccaaaacagcgtcaacaacagccacacagacacctacgtggggacgacacgggactttttattgacggagactcatgtttacaccctcccctttcccataggtaaaaacccacgtttataacacacgttgtttttacctgaaacccgcgcggcccgtggacgcgacaaaaaaccgcggcactagaaagaaaatgaaacaagtatgtttattaagcagcatgtggggctaataggggggataactgaggtatagcaactattaaaaaatactacaaaaaaaaaaagctgaacatggtcatctagcagcaaagttctccttctagaccacgaccaccatctgtaccacgtcgccctccccggccgtgtacatcacatccttcaccacgaccggcggcaacggcggcgacgaggacaactcgctctcgacggaggccgggacgacagaggacgggggggtggtggcggcggaggacggaggggtggtgacggcagcggggtcttcttccgacacgggcgacggcagactcggcggcgcggacagcacccgttgcgccggagcgtgagaaggctgaaccccggtggcctggatgtgggccaacgaattggctcgcagcgaatcgcgatccacgaaggtcataggaatcttcccttcgcggatccgccgctcagattccaggatggcgcgcacgtagctgttcaccgatttggcaaaagtgcgcggcccctccgtattcttgtcgcgacgcgcttccaacacctgcttttcgtagtccagctggtggaagaccatcaccaggtcgtccatggtgtgcgcgtgctgacggacgtgggagcgcacctccaccgggaacagagcgttccaatactccagcactatggcaccgtgccagaactgcgccatgctgggagccaggaaaaacaggataccggagtcgtaggcgaacacgtcccacttgggcgtcatgaacaacaccagctgacgcgtgggccgcctcgaagcttcctcccaggcctcgatgaccccgaacatgatgagctcctggtccaacggggggcagtgtcgctccagccaactgatcttgctcaggttcatctgcagaaactcgtaggaggggtcgcagatgcacacgtagagacccgagtcgtgccgcagcctggctccgcgcttcatcagtttcctcaccgcgtagcgaagcgccaccttgcccaacgccgacgcctggatcagtccccccacgtccatctgcgtctgtcgccactcggcctcgtccagcaggctcatgatagcggcggtgctatgcgtggtcgtagtcatcctttctatccttctctatgaatagcagcaatagcggtaaagtcccttcttatactatcccggagtctgtggtttttttgtttacccctgcttactggtgagactgctgggggccgttgtgctgcagcagccgagcttgtcgccgccgttgccacaggaaccggtgcctccgcagggcctttttgagggcctcgcaggcttctcgcgcaagtcctgagaggccctcggcgtcgatggggttcacctcgggcgtccgagcctcgttttcttcttcttcatcctccctttcctcctccgtgtcctcccgctctgtgtcctccgttacgctctcctccccggcctcggccaagagcgcggccaccaagtccacggaccgctcggtctccgagttctcaccgtcaatgacgccatgttggcggcgtaaccggtgccgagaacgccgggtgagcgcacatgcttttttctttcttaaccaaggcgggagaggatcttcaaggcgttttcgctggatccagcggtagctaaagtaccaaaaggccagcaggcccacgctacctaacagattcacgtagactggagacataattaaagaaagaagtgaaacccgcgtgtgggtctcacgtcgtcttgaaacaccgtcttatatacatgaagatgccggacatgacgcgcccaagacacgtggggttttccccttaggcgacccgatttcttaagatgtttttcatcttcgcacgcgatgtactacatcaaagggtcggctgaccgaccgcattgacgcacagtttccgagtacgcgcgtctcggagcacctgacggtgagccacccagctcacgcggatagggaacaacactgacgtgaggggcaattcacgtcactgacggctgacgggaataagacgggtgagggatttccacctttttcttaagtgtgactgtccttacggtaaatcgcacctgtgacctcttaacccctcctccctggtacccgataacagtgaaaaacacacaccacacgtcacgacaccgatcgattttctttattcttagtgtgatgataggtaagggcactcgtgaggatgtgcagttatcattatcaagccttcttcaaggcgtagtgatgatcgttgggcagaacccccaggctcctagcgatctgggaatagaaggaggagaacgagcccagggccagaatgcccacagtgtacatggcccaggtctccagaccgaacgtggcgggtcgcagcttcagatggtaggccacccgctccgagagttgtgaatgctcgttcaggcaacaggactgcagatgggtgagcccaaaagcgctttcgtttacgccgcgcacgtgcaccgtctgggccggacaatcctggtgttgcgcgcgaaagtggtccaggcaggagactccgtctgcgcggcgatgtgtgttgttacccacttcaatcaacagcgtgttaacggcaagatgacgcgagaacgcgacgacggtgttgctggaggtctggcggcagcagtacaaaggcgcccgtcatgaagacgtaggcaggggaattcccatatttttatggcttcttttaaaagtctgtgtccgactccattcggcgcttttcccaaaccgtggtctcctcgtcgtccgactcggtacccaggagatggtaagtcttttgccgcacgtagaaagctttcaacgtggagcaaaagatgagaataaagaccccgaaaacgaaacaaaccacgccgatcatgccgatgcagacgttcatgtcgacgtagccggcggtgctgttggcggtgcggcaaaagagtgtcatgtcgtacgtgcacaaaaaacaccacacaccacaggccaggtcgtagcgtagttattattccgtagcagcaatgatggtacagtcaagcacatgatctatttcccgttatcccgatgttgacaccgtccccgttgtattggaattgtcccggttaatcaccacggtgaacaccacggccaagaaaatgatccctaatatagcgaccactaagagagcaaaagtccatttccagccgttgtcaaagtacgcccccgtggtgggatgcatggtggcgggcatttccatcatatccatgtcgaacgtgtgtcgcggcgacggcgaactaaccaggcagtacgggggtcgatagggcggtgggctgcagtcaggtggtggcggcggtggcgtggaaaccgtcgtcgggcacagacccatggcctgctcgtaggtggggggcgcgtcgtcgtgatcccggtcgcggagcatcggcgtgggctccatgtcggtggcagtgacggcgacggtggtaactgtggtggagacggtaccgacggcgtccgcggctcaccttcgagcaaagagccccttctttttgcgcaaacgacggcaaaacagttctctgggacagccggtggcgcggtaagcgggtgccacgctttcagggtgtgtaaaacagtcgcgggcgaagcagtagttgttgcagaaccgcaagaacccgacgcgaaagaagcccaggagtccgcgcgccagaaagtgcgcctgccgcgtctcgggatgcacgccgaagacggcgccgctctcgttcaccagtatggagatgtccaggcgctgctgtgactccaccggcacggcccgcaccacaaatacctgcagcacgttcagcgagcacgtctcttttaaccagttgccgtgggccggatcctcgtaagtctggctcccgttcaagacgaccgtcgtcagcgcctcattaccgtctcgccagctgaagatggaaccctcgcgcttcatgcacaggcgccacagggccagcaggtcgcgcgccaacatgaactcgcgacccacgtcgccgccggtctcgaagcggacatagcccagttcttcgcgcagcggcgcgtagttgcgcaggccctcctgcacgaagccgcggaaaccggaccgcgacaccaggtacagcgattccaccacgggcgagtagacgtagacgcggccgccctcgccgatgagtatgggtagcggtgggcggccgatggcttcgcaacgactcacagtgcccaccggcagcaggaacttgtcgcagcacaggaaggtcttctccaaacctttaatattgagatgtccaaagtagccaacgcgtaacaggtcgcagtaggtgaagaaccaaccgttcggccagttgagacgcagcaccgtgccactgacgcgacgaaccagcttctgcaggtccttgcgggcgtcggcggtgacagagcagcggaaggtctcgttgaccagctcgacagccagcgcgtcctccagcgtgcgttccttcatctcgtcgttaatgctctggcggcgccgccggatttcgtcgaaacgggccgcggaggcggcgaccgacgcggaggtcgtccgaacgccctctgtgacgctgtcgtccggccagtcaagaaagctaaggctggcgctgcgccgcctaaagtgtccgatccgcgcgggacgtcgctgaggaacggtggctggtctgctggggcgggtacggccgcgggtgtccgcggacacgttagttatacacgggattgagtcacgtggcacgttgccagctgaaaccgccgtcgtctccgccggcgttttctccatcgcgggaccgcgccgtgcgcgcaggccgcgtgcccgggcacgcgctctagccgcacttttgcttcttggtgttagggacgaactcgaacgttacagaatcctcgctgtcgctctcctctttcgcgtcgttgaagtaattgccggagttgcgatccaaaccgccgcctcctcctcctccgccgccgcccgatccacctttggacgtcaggtaactggtgatcttgtgctgctcgtatttttccttggaggaaagaccgtgatcgtgatcaccgccgccgccaccgctgctcattttccgcgtaccggaaccaccgccgccaccgcggtcgtgcttcttgccgccaccgccgccacctcctcccagaccgccgagacccatgggctcgttcatgagatcgttatccagacccgggccgtcgtcgtgcagaccgccggcattggccagcgaagagaggctgccgccaccaccgccgccgccacgcgacttgccgctgttcccgacgtaatttttgtcgaagggatcgccacgctggaaaggttcctcggtgagaaagttctccacggcgaacagaccgttgcggctggccacgtacaacagcgtgtcgtgctccgtaactatacgcagcgtgcacggtagtttggtgacggcgcaattgagcagcgtctggtagaagttcttcagctgcacgttgatacgcatgttttttacgccgtggaaactgacgcggttattggccgtgaattccagctcgctgccgttggtcaggatgaacttgatggccggcggaccggcgtgcaccagaatctgcacggtgcccgtagggcagggcgcttttttaacgttacgcttgacgcgggtatgcggcccgatccacttaagcaggtcggccaccacgccgaaatcgagatccacgtgcacggccgaattctcgctttcgcgcacaatgtcttgaccgtgcacgcaggccgagctgaactccatattgaaatcgggcgcgcacatggagatcttggccgacaggtccgagatgtcctgcacgtagaacttggtcaggtccttgctggaggtcaggtacataaaattgccgagcagcggcgtggaattgttaatggtcttgggctgaaacgacttgtcggtgatgtagaggcatgagctgttaaaagtgatttttgacacgcaatgactgcgtaccgtttgcaagataagcgacggcgtgggcaagaaggtaaccgtggtgttctccttgagcgcacggatcacagatcgcagctgctggatagccgtcttgtacggcttcagccgcagcgccagcgtcggtggctccgagaggcgcgtcttgcgatccatcccggacagcgtgcaagtctcgactaaggagcgggcgcgagcgagcgaaagttttatagagagcacacacgacgaccgggaacgctgcgaagacgcccggcgtctaataatacagccgcgccgagccagcgggcccccgactaagaggcacagtacttatatactccgaccttaaagcgccagtggtaccacttgagcatcctggccagaagcacgtcgggcgtcatccccgagtcatagtagaaaaccagggccacgcactggtccacaaacacgctcaggttcacggccgccatttccacgtcgttttggatcgccggcgccgcctggaacagacactgcgtcgccttgccctcctcctggtgctgctccaaccacgcgtaattcaccacgggcacgcgcagcggcctccgcaccacagtggggaagtaacactcacggttgggcgggcacaatgaccacaccgtctcctcctcgaacacggtgccgcgcgaagcccatactgacggcgtcacgccccacagatgcgccacctcgtcgtcgggacccaccgccagaaactgacagttgcgcaatccgaactcgagcatgtcggcgcgcagcgcttcccagcgcgcgctggcgatggagagccgcggcaaccgatacaattcgaaaatgaatttgccctcttgatagatggtgcgttcgaaccattcgcagcgtggcaaacccgacttgcacaaatcgacgctagcgcgcaccgcggcaaagtacatgtgctcaaagatgcgctcgatcaagtcccaagaggcaaagtacgtaaaccctaaccgcataagcgcagtgtgcaggccagccacgccgatgtgcagcggacgcagtttttccagcgcgctctctacccaccattcggacgccgacattagcgcgtccaagcgcgcgttgccccaaaccaccgcctcggtcaccaactcgcgcagcacgctcaaatcaaagtaacgtcgcgtgttccccaaaaccacgtcgggtagatgcagcttctgctcgtcgctacgcgcaaacacgcagcgagccacgttcaccgtcagccgctgcaccggcatgtcacactcgccaaagtggcacgacgccatatcgggactcaagcacggcggcaggcacacgctgtcggccataatcgagtacttgactacgtgatggacaaagaccaccgaggcacggcccttgagcgcgcacagcaacatctttttcagaaaatcgtccgtgttcacgaccaccttggggcacgattgctcgcagcgcgaatactctttctcgaaagccgactcctgacccagatccgagagccgccgggagacaggccgcccgaacagcgagtagcgctgctcacgcgcacggtagcgcttcattaacacgctaggcacgttgaaagcgtagcaaacccccgtcaactccgacgtgctttctttgagaataaagttaatcacgcggatagcggccacgtcccacatgtccacaaacacacgtaccacgggtcgatgcacctccttctcgcgtatcaaatcgcagtatccccccaggcaacgaatcacgctgttcacatcggcgttgagtcgcgttacgttcaccgacacagaaacgccgcaactcaaggtactcatccacttgcacatggccgcccaactggcgtcacgcgagaaagggtcggccgagatcagaaagtcgtactgcggcacgcgatcgaaacccacggtagacatggtgaaggtagacagcgacagctgcccatcgcgacagcgcttcaacaccgagtccaacacttcgccctcgaaacgcgcatccagatggaaacgatagatgcgcgagtgcctactgttctcgatagcggccgtcaacgccacggcgatgcgcaaaaacacgccgcccgggctctcgtcctgtccatgcagttggcgacacaccttatccaaacacaaaatagccgcgtacaagccccagcaaccggccaattccacaaaacgcgccgtctcctcggccagcttgggtagatcctccatgtgacgcagcacaaaacggcgcaccgactcatcgcacagctccgaagcgtaacacagtggcgtgcggctttcgcgcgcccagttggctttgaaataaaagcgacccaacagcagatcgcaacgcggcgagtgacgaatcagacagggaccgtggcgcatgatgagctgaaacagcctgaaactgcccaaaccggcactgtgtcgcgacacggtgtccatctcgcgccacagcgcgttcctgtcggacggcagctcccgcgccggctcctgtacgccacaaaagcgaaacttgccccagtagccgtgacaatgacactttttgcccatcaacatgcgcgtagcctgtatcggcggcgatactttgcagagtgaagccccgaaatcgtcctcctcctcgacactgtccagctccatcctggtcgcgccggccggattgaaggtgctcagaccgctactcacacgtccaccgcgactgggcacggcgggaccgctgtcacgcgtcaacgacagcacagacggcgtgccgtcgggagacggcgactcgggacgccaactgacgacgccgccaccactcgtaaaacccgctacacacgctacgccgctcgatacgttggtatttccagcggacgcttccttgtcacccccgggcagcggcccctcctcgagctcgctgtcatctcccccggtagtatcagcggcggcctctgccgacgattcctccgtctcggtttccgagccgcggcttggaatcctacctggccggcaccgatgtgcgggcaccgaggacacccgctgttcctcgtccgcgtcagccggattcataagtttacgaggaaaataacaaagaaatcaggtagatttcaataaagtgagtctagatggcgccgataactacggtttataaagtctgtgtgcgatgtgtttatttttttcttctgtgtctcctccccgtatgctgtcagcgccgctcagacgaattctcgaaagtctcccaattcgacgctaaagttgtccaaacggacgacggacagtttgagttctttgtgtaccaggaacgaggtgtgaatgtcgtcagccaggcaccagcccagcttttgtatgaccccggtacacagagggatctggcgcgggcgcgtgatgcgacggttgacaaagctacagcgctcgcgggcgaactttccgcgtgcaacgtcgaccagggtctgccagtgtgcgatgctggaggtgagcacgtagatgccgggacgtgtttcgggcccgtcatagtcatagacgatgattaaatacacgtattgcagccgtccccgggtctcttcccacgtcaggtacatgtctttcggtatcatcaacgcgaacacctccgttttgagcgtgttgtaaaggtagccgcgcatgacgcaggtgagcaacgaggtgatgcccagcgagacggtcttaacgcagcccagcgtctcaaggcggcggtgcagcagatgcgggcccaggtccagccactgcagcgcggcgcgcgcggccgaggccgtgtacacgctttcgagcaggcagcgcgtgctggccgagacgttggaggcgcgaatgcctaacaggtagaggctgatgtagaggtgtcgcggcgagtcgcaacccgtctccatgcggatgagcagcgcgcccggctgcgcctcgaactctaccaggccctcgggcacgaagaaacgcgccgtgagcgcctggtgatcggcgtggtagaggtagcgcaccgatatagtatttacctcgcgtttggctttgagcgccgtcactagttcattgtcctcgtcggccgggtcgcgcggccgtttggccaccgcgcgcgcgtccatgatggcgaggcgcacggtagatttcaaaaagttgatagagcagctgcgggcacgggccacggacaaagcggaggcgttaaataccgtgagccaattggagatcggcgcggtggatgcccaggacgtgaccgcgagcgccgtgcgcgccttcgtgggtgcgttgccgagctcgggctaccactttggcttcgtgcgtcagaacgtggtcttttacctcctaagccacgccacggtacagacggcgcgcgacccgctgtacgccgccgagcagttgcacgaacagctggaccgcttcctgcgacaccagcacgacggcggcggggacgaggaccggttgccgttctaccacaacggggccacgctgacggctttccagaagctgttgcagaccctgcgcgagatccagaccgtaatagccgaacagagcggcggcaccgcggcggcggcggacttgatcgccagtaacaacgcgtcggccgagcgccgcggcaagaagggcggttcgagttccgggggccagcagccgctggtccgccgggtgatcacgcagctggaaacggctgccacggaggcgcggccctacgtcaattgtcgcgccgtggccgaactcctggacctgacctaccagcggctcatctactgggcctgcacgctcatgccctacgtgttgtttcggcgcgacaccgacaccgaactggacacggtgcttctgatgcattttttttacacacgctaccgttcggttaacggcgatttggccgtggagtttcaaaactacgtcaagaacagcgtgcggcacatgagctctttcgtcagttccgatatcgacggcgaccagaagcccggtgccgaacacatgcgtgacgtcagctacaagctgttcgtgggtaatctgcaggcgcgtgacgccagcggcctcatgtttcccatcattagcacgcgcatctccaccgtgaacctttacctgtcgcccgaacgtatgtttttccacccgggtctgatctcgcgtctgttgagtgaggaagtttcgccgcgcgccaacctagacgcttacgcgcgcgtgtgcgatcgcgtgctggaagaccacttgcatacgccgcgacgcgtgcagcggctactggatctgacgcagatggtaacgcgactggtggaactgggtttcaatcacgatacctgcgcggcctacgcgcaaatggcgctgatccagccggccagtcagaagagctcgctctttgtcagcgagattcgcgagaaactcatacagatcatctacaatttttacacgtttttcatgtgcctctatgtgtacagccccacgttcctgttcgaccaccggcggcggttgattttggagcagcatcgatccacgttgatcggctccaaggaggaactacagcacgtctggagcaacgtgacactgaacgtcaatacgcactttgcggttcagtacacggaagaagactttgaggcacatacgaagggtgccacggaggcagagcgcgagtacctgtatcgggacctgcacagcaagtggggcgtgcacctgtttaccttgcgtccgtctcgcggcgcggccggcgcggcctcgcctttgcctccgcttgacggcgtcacacgctccgacatcttacgcgaatgcgcgctcgttaatctgaacgaaggccgcgtcaactacgcctccctgctagccttcagccatcatcccgagttccccagcatcttcgcgcagttggtggtggtaactgaattttcggagatctttggtatcccgcagggcctgtttcaagccgtgggttcgccgcgtcttttcgcgctcattcagctgtgtcgtgtattgttgcccgagcaggtgacgctgtaccagaacctggtctccatttacaacctgaccacctttgtcaagcacatcgacgccgcggtttttaagacggtacgcgattgcgtcttcgacatcgccacgaccctcgagcacctcagcggtgtacccgtcacgcccaatgtggacctgctggccgagctcatggcgcgctccgtagcgcataacctgtacaccaccgtcaacccgctgatcgaggacgtgatgcgcagcagcgccggcagtctgagaaactatctgcgacacacgcgactctgtttcggtctggcgcgcggccgggcgcgcctctcggaggacggcgtgacggtgtacgtggaggtacagggtcagtacggactgcgcgtacctaccacgcgtttcgtagaacagttgcgcgaactggttcgccgcgatcggctgttggccgagaatctgcgcggcttaaacgagcgcctgctgagtgttcgcgtgcgcgtacgtcagatcagcagcgacacagaggaagtaagccgacacgccaagggtcaccgcacggtggcccagatgagcaaggcgctcaaaaagacggcctccaaaatcaaagtgttggaaacacgcgtgacattggcgctcgagcaggcgcaacgttccaatggcgccgtcgttaccgcggtgcaacgcgcgctagccgtctttgacgtactaagtcgcgagaacttggaacgccgcggcgcacagctctgtctgacggaagcgacgagcctactgcaccgacatcgcgcgctagcgccgatgacctggcccgcgggcacgggcgttgcggcggcggccgaagcggatcgcgccttacgcgagttcttggaggcgccctgggaatcggcgccccaaccgccgcgactccgcatgacgcccgacaccgatcacgaagaatcgacggcaggcgcgacgtccgtaccggaggtcctgggtgcgcgctacgaacccgcacacctggccgcgagcgacctattaaactggtacatcgtccccgtaagccaggcgcagcaggacatcttgtcttcgatcgacccgcccgccggctcgacatcggtgtccctgccgccggcctcgccatgaaagtcacgcaggccagctgccaccagggcgacatcgctcgctttggagcgcgagcgggcaatcaatgcgtctgcaacggcatcatgttcctacacgccttgcacctgggtggaacgagcgccgtcctgcagaccgaggcgctggacgccatcatggaagagggcgcgcgtctggacgcgcggctagagcgcgagttgcaaaagaagctgcccgccggcgggcggctgccggtctaccgactgggcgacgaagtgccgcgccgcctggagtcgcggttcggccggaccgtgcacgcgctctcgcggcccttcaacggcaccaccgagacgtgcgacctggacggctacatgtgtccgggcatcttcgactttctgcggtacgcgcacgccaaaccgcgtcccacctacgtactcgtcaccgtcaactcgttggcgcgcgccgtggtcttcaccgaggaccacatgttggtctttgatccgcacagctccgcggaatgtcacaacgccgccgtgtatcactgcgagggtctccatcaggtgctgatggtgctcacgggcttcggcgtgcagctatcgcccgctttctactatgaggccctttttctctacatgctggatgtggcgaccgtgccagaggctgagatcgccgcacgtttggtctccacctatcgcgaccgcgatatcgacctcaccggcgtcgtccgagaaagcgcggacacggcggcgacaacgaccaccgccgcaccttccttacctccgctgcccgaccccatcgtcgacccgggctgccctcctggcgtggcgcccagcattcccgtctacgatccctcgtcctcacccaaaaaaacacccgagaaacgccgcaaggacctcagcggtagcaaacacggaggcaaaaagaaacccccgtccacgacgtccaaaacactggccaccgcctcctcctcctcagcgatagcggcggcctcttcttcgtccgcggtaccaccgtcctacagctgcggcgaaggggccctgccggccctgggccgctaccaacagctggtcgacgaggtagagcaggagttgaaggctctgacgctgccgccgttgcctgccaacaccagcgcctggacgttgcacgcggcgggtaccgaaagcggcgctaacgcggcaacggccacggcgccgtccttcgacgaagctttcctcaccgatcgtctccagcagctcatcatccatgccgtcaatcagcgctcgtgtctgcgccgcccctgcggtccgcaatcggcggcgcagcaggcggtacgcgcctatctgggcctatccaagaaattggatgcctttctgctcaactggctgcaccacggcctggatctgcggcgcatgcacgactacctgagccacaagaccaccaaaggcacgtactcgacgctggatcgcgcactgctggagaagatgcaagtcgtcttcgatccctacggacgtcagcacggcccggcgctcatcgcctgggtggaggagatgctacgctacgtggaaagcaagcccactaacgaactgtctcaacgactgcaacgtttcgtaaccaagcgaccgatgcccgttagcgacagcttcgtctgcctgcgacccgtagactttcagcgtctgacgcaggtcatcgaacagcgacgtcgggtgttgcaacgtcaacgcgaggagtaccacggcgtttacgagcacttggccggcctcatcaccagcatcgacattcacgacctagacgccagcgatctgaaccgacgcgaaattctgaaagcgctgcagccgttggacgacaacgccaagcaggaactctttcgcctgggcaacgccaaaatgctagagttgcagatggacctggaccgtctgagcacgcagctgctaacgcgcgtgcacaatcacatcctcaacggctttttgccggtagaggacctgaagcagatggaacgcgtcgtcgagcaggtactgagactcttttacgacctgcgcgacctgaaactgtgtgacggcagctacgaagagggatttgtcgtcatacgcgaacaactgagctacctcatgacgggcactgtgcgcgacaacgtaccgctactgcaagagatcctgcagctgcgacacgcgtaccagcaagccacgcagcaaaacgagggtcgcctcacgcagattcacgacctgcttcatgtcatcgagacgctggtgcgcgacccgggcagccgcggctcggcgctgacactggccttggtacaggagcagctagctcagctggaagcgctaggcggcctgcagctacccgaagtgcagcagcgcctacagaacgcgcaactcgcgctaagccgcctctacgaagaggaagaggaaacgcagcgtttcctcgacggactctcgtacgacgatccgcccaccgaacagaccatcaagcgacacccacaattacgcgagatgttacgtcgcgacgaacagacgcgtctgcgactcatcaacgccgtactgagcatgttccacacattagtgatgcgactggcgcgcgacgagtcgccgcgaccgacgttttttgacgccgtcagtttgttgttgcagcaactgccacccgactcgcatgaacgtgaggatctgcgtgccgccaacgccacgtacgcgcagatggtcaagaaactggagcagatcgagaaagccggtaccggcgcatccgaaaaacgcttccaagcgttacgggagttggtttactttttccgtaatcatgaatatttctttcaacatatggtcggacgactgggcgtcggacctcaggtaacggaactctacgagcgatatcaacacgagatggaagaacagcacctggaacggctggaacgtgaatggcaagaagaggccggcaagctcacggtaacttctgtggaggacgtgcagcgtgtcttggcccgggcaccgagccatcgtgtcatgcatcaaatgcaacaaacgttaaccaccaagatgcaagactttttagacaaggagaaacgtaaacaggaagaacagcaacggcagctactggacggctaccaaaaaaaggtgcagcaggatttgcaacgcgtggtggacgccgttaagggcgagatgctctccaccatcccgcaccaaccactggaggccacactcgagctgctcttgggcctagatcaacgcgcccaaccgctactagacaagttcaaccaggacttgctgtcggcgctgcagcagctgagcaaaaaactagacgggcgaatcaacgagtgtctgcacggcgtgctgacgggtgatgtagagcggcgctgtcacccgcaccgagaagcggctatgcaaacccaagcctcgctaaaccacttggaccaaattttgggtccgcaacttctgatccatgagacgcagcaggccctgcaacacgccgtccatcaagcgcagttcatcgagaagtgtcaacagggcgatccaactacagccatcacgggcagcgagttcgagggcgactttgcacgctaccgcagcagtcaacagaagatggaggaacaattacaagagactagacaacagatgaccgagactagcgagcggctagatcgctcgctgcgccaggatcccgggagcagctccgtcacgcgtgtacccgagaaacccttcaagggtcaggagctggcgggtcggatcacgcccccgcccgccgacttccagcggcccgttttcaaaacgctgctagatcagcaggccgacgcggcccggaaagcgctcagcgacgaggccgatctgctgaatcagaaagtacagacgcagttgcgacaacgcgacgagcagctgagcacggcgcagaacctgtggactgatctggtcacgcgccacaaaatgagcggcggactggacgtgaccacccccgacgccaaggcgctgatggaaaagccgctggagacacttcgcgagctgttgggcaaagccacgcaacaactgccgtacctgtcggcggagcgcacggtgcgctggatgctggcttttctggaggaagcccttgcgcaaatcaccacggaccctacgcacccgcatcacggaagcaggacccactaccggaacctgcaacagcaagccgtcgagagcgccgtgacgctagcgcatcaaatcgaacaaaacgcggcctgtgaaaattttattgcacagcatcaagaggcgactgccaacggcgcgtccacgccgcgggtcgacatggtccaggcggtggaagcgatctggcagcgactggaacccggacgcgtagccggcggcgccgcgcgtcatcaaaaagtgcaggaactgttgcagcgcttgggtcagacgctaggcgacctagaactgcaggaaacgttggcgacggaatactttgcgctgttacacggcatccagaccttcagctacgggctggactttcggtcgcagttggaaaagatccgcgatctgcggactcgttttgcggaactggccaagcgacgcggtacacgtctctccaacgagggagccctgcccaacccacggaaaccgcaggcgacgacttcgctgggcgcctttacacgcgggttgaacgcactggaacgacacgtccagctgggtcaccagtatctgctcaacaagctcaacggctcatcgctagtctataggctggaagacattcctagcgtgcttccgccaacacacgagaccgaccccgcgctgataatgcgcgaccgcctgcgtcgtctatgcttcgcgcgtcaccacgacaccttccttgaagtggtagacgtcttcggcatgcggcaaatcgtcacgcaggccggcgaacccattcacctggtcaccgattatggcaacgtagcctttaagtacttggcgctgcgagacgatggccggcccctggcatggcggcgccgctgtagcggcggaggactcaagaacgtcgtcaccacacgttataaagccatcacggtagccgtggccgtctgtcagacattgcgcactttctggccacagatctcgcagtacgacctacgaccctacctcacgcagcatcagagccacacgcaccccgcagagactcacacgttgcataaccttaagctcttttgttatctggtgagcaccgcctggcaccagcgcatcgacacgcagcaggagctgacggccgccgatcacgtaggcagcggcgagggtggtgacgtaggggaacagagaccgggccgcggtaccgtgctgcgcctgagtctgcaagagttttgtgtactcatagcagctctgtaccccgagtacatctacaccgtcctcaaatacccggtgcagatgtcactaccctccctcacaactcacctacatcaggatgtgatacacgcggtagtcaataacacacacaaaatgccccccgaccaccttcccgaacaggtcaaggccttctgtatcacccccacccaatggcccgccatgcagctcaataaactgttttgggaaaataaactggtacagcaactgtgccaggtaggcccgcaaaaaagcacaccgcctttaggcaagctatggctctacgccatggccacgctggtctttccacaagacatgctgcagtgtctgtggctagaactgaaaccccagtacgccgagacatacgcctcggtgtccgaattggtacagacattgtttcagattttcacgcaacaatgcgaaatggtgaccgaggggtacacgcaaccgcagctccccaccggagagccggtgcttcagatgatccgcgtgcgacgtcaggacacaaccaccacagacacaaacacgaccacggagccgggacttttagatgtttttattcaaacagaaaccgccctagactacgcgctgggctcctggcttttcggcatacccgtgtgtctcggcgtgcatgtagccgacctgctgaaaggccaacgtatactagtagcgcgccacctcgaatacacgtcgcgagaccgcgacttcctccgcatccaacgctcccgggatctcaatctcagtcaactgctccaggacacgtggaccgaaacgccgctggagcactgctggctacaagcccaaatcagacggctacgcgattacctgcgtttccccacccgcttagagtttattcccctagtcatttacaacgcacaggaccacaccgtcgtacgcgtgctgcgaccgccctccacgttcgaacaggaccacagtcggctggtgttggacgaggccttccccaccttcccgctgtatgaccaagatgataactcatccgcggacaacgtcgctgcgtctggcgccgctccaacaccgccggtacctttcaaccgcgtgccagtcaatattcagtttctgcgtgaaaacccgccacccatcgcgcgagttcagcagccgccgcgccgacatcgtcatcgagcggccgcggccgcagacgacgacggacagatagatcacgtacaagacgatacatcaaggacagccgactctgcattagtctctaccgcctttggcgggtccgtctttcaagaaaaccgattgggagaaacaccactatgccgagatgaacttgtggccgtggcgcccggcgccgccagcaccagtttcgcctcgccgcctatcacggtgctcacgcagaacgtcctcagtgctctagaaatactgcggctagtgcgattggacctgcgacaactggcgcaatccgtacaggacactattcaacacatgcggtttctctatcttttgtaaccgacactgacagtagcgggtaataaaaacaataggctttttatcgttttttatgttacaaaacaacgtatcacttttacggtgatttattcttgctattctttttccccttgggctgtcagcgccgggtgcgcgacacggctaccatgcgcaacaggtccagcttaaaggcgcacttgtcattaaacaggctggacatgcgcgtgtacttgctcagcatggtggccaacaccgggtgggtggcctctgatatctcggtcggcagctccaaaacgacgttgacgacgtgacggtgtttttcgtcccgcttgttggccaccgtgggtcccggcgcggtgttagacatggggcaggccgtggggggaggacgaagaggaagccgctgctaaaccgccgcgcgcctgctgcacaatgtggccgccgacgtggcaggcggtctgtttaaccagcgcgcagccccgacacagcggggcgccgtcttcgctttccaaacagctgtcgcggtactcgcccgtctgacagcgcgcgcacagcaggccgtgcccgtgcgaagtgaggcgcaggagacgcgggaccgtcacgccgcgtaccaccacagtggagtcgcaggtgcgtgccgcgcagggcagaatgacgtcgaaagccagccggtgatcgtacacggcacaagccgcgttgaggcccagcacggctttccagcccacgcgtacgcagcgctgtccaaagagcgtctcggagacgagctcgtagacgcgctgccgcaccacccgctgactgccgcagagcgagcagtgcacgagctcggcgtgcgtgttgaagatgacgctcttttcttgacggtcccgataatagaacatcgagttgagcggaaagttttgctggcagtgtagcttttccttacccaggttgaggcagtgtccgcactgccgacagaccacggccaccagcgagcgcgcgtccagatggcgctcgcacttgagtcgacacagacaccagagcggcaggtcgatgacgctgccgatgaggccgccgcgcagcgcggcgctgagtgcaaagaggacgatcttggtgggctctacgtgacgcgcctgctgtccggcgcccgcgtgtcctaccgccgcagctgccgccgtcgagcctcctccgcgcgtctcgtcgtgcagacccagtgcccgcaacggcaccaggtatcgcggacacgtgtcgcaaaacgtctgcaccgcttgtcgggccagtacgtagagcgggtttccgcagggtaccttcccggcgtgccggcgcaaggctgcgatgaggccccgcagctgcggcgaccgcggctgccgttggtgacaccactggttacggtggtatacggccaaatcagcgcgggcgtcgaagcgcttggcgcgtagtagtgctaggcacggcgagctggtggggtgaagcacgggcagccgaaggtccaccccgaaaaggaaacggtgaaggtcacctagcagcgaggaggtgacaccgtccaacaacgcgtgcagccgctcgggcgggtagagccgcagacggcgcagcaggtagtcggtgtcgtagcgttcgaaacgcagaaaggccatcgtgcggacggccacggtgtgcagacagtccatgctgtagacgtaagcgagaaacacaaagtagggcttggtcataaccatacgctgaaaaagcgccgtcaccgcctcccgctcggcctgccgacacaccagccattcgcgcaggaagcgttggtagagacggtcgcccagctcgcgattcagaaagcgcttatccgtcacgaagagatgaaggacgcaagaacgtggcacgtgatgcaccagctgctgctggaggaccgccgacgtctgcgccgcaaactgcgccggtggctgcgacgtttctaccgccgcttcctccggctgcagcgcaccgcggccgatcaccagctgcacatggaaatggtcctcgtgaacgcagaggggcgcgaagagacggcgcagagcctggtggaactcctcagtcgcggtgtgcggagcgtgtcggagacggcgattggccatgaccgcgccacagcagagccagcaccagcaggagagccagcaccagcgggcccagagtcgcgaagcgcgcgggcagccacggcccagactgcggtcgcgatggcccggagcgcgctcgccaccacgatgacggtgcccaacgataaccagtccgctccaaggacggcgcgcacggcggagacggcggatgacggtgatgggtcgacacccctcgccgacgactcacgtgctcctccagaggccgacgcgcggaccctccgacatcctggcccgccgctgccgctgccgccttcccttctcccgccagagccagcaactcctcctcctcttcatcagcgtctccctcgcttgcgcatccgcatcgtcccatacaggcctcacaacgacacagccgccacgaccccgccgccatgggtggcggcggcggccgaggcccggcagcggcgccgccagcggcgaccatggtgggagagcaactcggatgacgaggaggaggaggagggggagatgcggtccgagaggaccgctttcccgccgttcgcgtgagcgcggccgacatgcgggcgcgccacagggacggaccgctgccgctgtgactgcttacggtgacgtggttccggaccgccaacgacgtcgacgcggctttcttggcgtacagctcgcgcagcagattctcgtactcgccctcgttttcgggtccgaaggcgatgagctcgatgttgaagaccgacgccgaattggatttgcgcaccacgcacttcgtcagcactccgtaggccgagggcttgatctcctcgatgtccttgagcgtgacgatgagcgactcgttcaccttaagcacattgaactcacctacgtggcgcgccggcgagacgagcttgacgggcgctcgcacaaaacagcagagggagacggcacagccagtgtttttaaagataaaacaaggcacgtggtctgtgcggctctcccagtagctgagcagatactcgacacaatagaccgtgtctgtcttgagcatggcgtcgcacaccgagtaattggggtttttacagatgaggccggcgtcggtgacgcgcagctcgctgggacccaacttgaggatacgccgcgtggcctgcaccagatcctgatggagaaccttgttcatctccatcgcaccgacgccaccgccgatttatttacccggcgccggctcgtcttttccctccaggattccgttaatgtccatgagcttgctgacgatcgccgttaatagttgcgtcttctcacggaggatctctccgtgactgcaggtcgcgcagtcgccgtgcacgtacttgaggaaggcggcgtacttctgacccgcgttcacgaaatttaagcgcgcgtccagagagggcagcaacagatcgtagacgcgcggcagcatcggctcgaactgtaatagcagatcgtcgtcaagatcgggtagcgcgtgcccgtcttcaccgtcctcgtcgtcaccacctcccccctcgagcccaccgctcgtaccagccgcgggctccgcgtcctcgtcgatcaccagcggtcgcgtcggcaccggagaatccacgtcatcctgcacgtcgttttcctcctctccgtcgtcatcgtccagaaacggcacccgctgcttagcccaggacattctttttccgcgtcctcaatcagcggcgccgatcgccatgaatccgagtacccacgtgagcagtaacggcccaacgactccccctcacgggccccacaccacgtttcttcccccgaccagcccggccccgtccaccagctccgtcgccgccgctaccttgtgcagtccgcaacgacaggccgtttcacgttacagcggctggagcaccgagtacacccagtggcactcggacttgacaactgagctgctatggcacgcgcacccacgtcaagtacctatggacgaagcgctggccgccgcggcggccgcctcataccaggtgaatcctcaacaccccgccaaccgttaccgtcattacgaattccagacgctcagtctcggcacctcggaggtagacgaactgctcaactgctgtgcggaagaaaccacgtgcggcggcacgcaatccaccgtactcaccaatgcgaccaacaccactaactgcggcggagccgtcgccggcagtagcaacgcaggacccgccggcgcttcggccgcctgcgacctagatgcagaactggccggcctcgaaacctcggcggccgactttgaacaactgcggcgactgtgcgcgccgctggccatcgacacacgctgtaacctatgcgccatcatcagcatctgcctcaaacaagactgcgaccagagctggctcctcgagtacagcttgctgtgcttcaaatgcagttacgcgccccgtgcggcgctcagcacgctcatcatcatgtccgagtttacgcatctgctgcagcagcacttttccgatctgcgcatcgacgacctgttccgacaccacgttctcacggtcttcgatttccacctgcacttcttcataaatcgttgctttgaaaaacaagtgggcgacgcggttgataacgagaatgtcaccctgaaccatctggccgtggtgcgggccatggtcatgggcgaagacacggtgccttacaacaagcctcggcgccacccgcaacagaagcaaaaaaccaacccttatcacgtcgaagtgccgcaagaactgatcgacaactttctagaacacagctcacctagccgcgaccgcttcgtgcagctgcttttctatatgtgggccggcaccggcgtcatgagcaccacgccactcacggaactcacgcacactaagttcgcgcgactagacgcgttatccacgacctcggaaagagaagacgcaaggatgatgatggaagaagaggaagatgaagaaggaggagaaaaaggaggagacgatccgggccgtcacaacggcggtggcaccagcggggggttcagcgagagcacgctaaaaaagaacgtgggtcccatttacctatgtcccgtacccgccttttttaccaagaaccaaaccagtaccgtgtgtctgctgtgcgaactcatggcctgctcctattacgataacgtcgtcctgcgcgaactgtaccgtcgcgtcgtctcgtactgtcagaacaatgtgaagatggtggaccgcattcagctggtattggccgacctgttgcgcgaatgcacgtcgccgctcggcgcggcgcacgaggacgtggcgcgctgtggactcgaagcgcccacctcgcccggaggcgactcggactatcacggcctgagcggcgtcgacggcgcactggcgcgacccgacccggtattttgccacgtcctgcgtcaagcgggcgtcacgggcatctacaagcactttttctgtgacccgcagtgcgccggcaacatccgcgtcaccaacgaggccgtgctcttcggacgcctgcacccccaccacgtccaggaggtgaaactggccatctgtcacgacaattactatataagtcgacttccgcgacgtgtgtggctctgcatcacactcttcaaggcctttcagattacaaaacgcacctacaaaggcaaagtgcacctggcggactttatgcgcgatttcacgcagctgttggagagttgcgacatcaagctggtggaccccacgtacgtgatagacaagtatgtctagcgtgagcggcgtgcgcacgccgcgcgaacgacgctcagccttgcgctccctgctccgcaagcgccgccaacgcgagctggccagtaaagtggcgtcaacggtgaacggcgctacgtcggccaacaaccacggcgaaccgccgtcgccggccgacgcgcgcccgcgcctcacgctgcacgacctgcacgacatcttccgcgagcaccccgaactggagctcaagtacctcaacatgatgaagatggccattacgggcaaagagtccatctgcttacccttcaatttccactcgcaccggcagcacacctgcctcgacatctcgccgtacggcaacgagcaggtctcgcgcatcgcctgcacctcgtgcgaggacaaccgcatcctgcccaccgcctccgacgccatggtggccttcatcaatcagacgtccaacatcatgaaaaatagaaacttttattacgggttctgtaagagcagcgagctactcaagctctccaccaaccagccgcccatcttccaaatttattacctgctgcacgccgctaaccacgacatcgtgccctttatgcacgccgaggacggccggttgcacatgcacgtcatcttcgaaaaccccgacgtgcacatcccctgcgactgcatcacgcagatgctcacggcggcgcgcgaagactacagcgtcacgctcaacatcgtgcgcgaccacgtcgttatcagcgtgctgtgtcacgccgtctcggccagcagcgtcaagatcgacgtgactattttgcaacgcaagattgacgagatggacattcccaacgacgtgagcgagtcctttgagcgctacaaagagctcattcaggagctgtgtcagtccagcggcagcaacctatacgaggaggccacgtcgtcctacgcgatacggtctcccttaaccgcgtcgccgttgcacgtaacttccaccaacggctgcggcccctcctcctcgtcccagtccacgccgcctcatctccatccgccgtcgcaggcgacgcagccccaccactactctcaccaccagcctcagtctcagcagcattatcaccgtccccagtcaccaccgccgccgctgtttctcaacagcattcgtgcgccttgacactgtacggcagaaaagccggctccaagtgcaagcgccgcggcagcaccatgtgcaaaaacttgtccttgcgcgcggtttcgccgccgggaaagacgggcgacagcacgttggttacagccttgagaacctgctcaaagtacttgtcggcgtgaatgggcacgccgtgctcgcgcacgtagctcggatcttcggctacctcgtagttgcacacggccgacggtggtttccgcgccctcttctttggcggctctcctcctctcctgttgctctcctctaccccgccgccgtcagcgtcgtcgtccgtgccatcaatcgcgtccgaccgggaaaccacgccggtggttacagaatcaccgttgtcagaggaaccctgcggcgccgtccggacaccgggcgccgtcagtacgtaaaagacccgatccccgaccgagggtagctcctcagaacgggccgccagtcgcttaatgacggcaatgtgcggcaggttagattgacggtacaacgagatgtccttagaaagcaccgacgaaagcaccaggtcctcgacacgcacacggtgcaggtacagatcgtcgcgggcctgcaccaggcggcgcaagatacgccagaaaccgcgtggcacgccgtatttcttgacttcatcgagtgagaggcgcgacaggcgcacggctgcttccgagacctcgcgatcctcaaagagcagcgagaggacgtcacgcgtaacgcccttgacgaactcgcaagccgtcttgcgcaccagatccacgcccttcatgctcagacccgaggcgccctccactttgccgatgtaacgtttcttgcagatcatcataagagagacgaagaccttttcaaactccagcttgacgggctccacaaaaagacaggccgtcacgtagtgcgccaggctgggcccacgcgccaccagagcctgcggcgtcagaccacgaaagcggacaaacacgctgtccgtgtccccgtagatgacccgcgcctccacccgccgttcgtccgagccccctgacgatgtttcgagcccctccggtaacgtgctgctctcctccgaatccccctcccgcgttcccaccacataatcttcttgattaaaaaaattgtgcaaaaaacacggctctgaaaagttgtctttgatgaaccgcgccgtgcgctctagcatgtcgcgaccgatgcgcgtgatgctggcggcgatgggcagacacggcatcatgccgttgaccacgccggtaaaaccgtagaaagcgttgcacgttactttgagcgccatctgttccttgtcgagcaacatacgacgcacagggtcttgacactcgcgcatgcattcgcgcacggcacgccgctgcgaaacccacttgttgagcagttccgaaagcaccgagacgcgcaccgaagcgcgcacaaagcggtgggtcacgccgttctctagcgtgacgctgtatacgtcggcagggtccacggggtactcgccacccggcaccaacagggtggagtagcagaggttgtgggccatgatgatggaagggtagaggctggcaaaatcgaacacggccacggggtcgttgtagtaacccacctcgggctcaaacaccgtggcaccttggtacgaaaccgccgcggtaccgccggcgccgtgactgtcgttggaaacgccgacgccgccactactgccggagccgacgctgaaaacgccgacgctgctactactgttactaccagagccgggtgaaacgccgtcctgactcgacggcgcagattgcaagggcggcgacatctgaaacatagccgccacagaacccgcgtcgccgggcacggcggcggtagagatgatagcggcgttaggtgacacggcaacgctattcgtttcgggcaccgtcgtacctttgctgtagtggttgggcaagataaaatcgcggcaggcgcactcgtctagcagcgaggtgtagatacggatctgctgtccgtcaaagatgacacgccgcaacggaattttagccagccgcgcgatggccccggcctcgtagtgaaaattaatggtgttgaacagatcgcgcaccaatacggcgtcctgcagacagtaacggcctacctgggcgcggccctcggcattagccacgaaacaacgcgggatgtccttgtaggacaggtcatccttgcgttgccgcaggtaaagctcggccatagtgttgagcttatagttgggcgagttagtcttggccatgcatacggggtacatgtcgataaccaccgaacccgcaatatacaccttggtggcggccgtgctggccggattattgtgagaagccgagggaaaggcggcggcgtactgccgcttaaaacccacggcggggctgtgtaaaaaaaaacggccgccctgcgccgtgggcaacttgcagaagcgctgcgagtccaccttatacaggtactcgaggcgcgtgaggatgtacttcaagtcaaaagagttgatgttgtaaccggtcacaaaggccggcgcgtaccgttgaaagaaaagcataaagcccagcagcagctcgtattcggaagggaactcgtagacgtctacgtctgggcccacctgcccgcaggtgccgatcgtaaagagatgaagacccgagtgcccaaagatcacgccctccgaggtgcagccccgaccatcgttcccgtttgggattccctgatccacggcggtgtttcctcccgtctcgtagcacacgcacgagatctgaatgacaatgtcatcagacttctcggcgcagggaaaaccaccctcgccgctcatgcactcgatatcgaaggacaggcaccgataacgcggccacgagctgtcgtcgggcacggccaccaggtcggagacatcgcagtcgacctcgatatcacaagtcgacgcgcgaccctgctgccgccagtcgtaacgattcacggaacaccagccgaacgtggtgatccgccgatcgatgaccaaacgcgtcagcggatccacacggacctcgtacacgggaaaaccctgctccagcagatactcgccgatctttctagccatggtccagttgctgatagacacacactgcaaatcgggcacgggtcgcgtcccgtacccgtagatggaggtcttggtggccggcgtgacagacacggcgtatggcgtccgcggttcgggcactagttcgcccacgctggcaatgacctcacgcagcctatcggtgtcgctgtactcacagtaaaagtagctgcgctgcccgaaaacgttgacgcagatactgtagccgtgttctgtggccccgaagaaacgcaacacgttccccgaaggcaccagatgctgacgatagcgcggcgacacgttttcgggcgagtcgaagaagagcacggcgtccgtttgatcgtaggtgtgaaaacgaataggtcccaccacgcgacccaccagggtctcgcgccaaggacacggccaaaccatgtcatgactcaacaaatgtttaatctctcgatagaacatgagaggcaaccgtcccgtcttatgcttgatcaaccccgtctgaccgtcgaacatgacgcctcgcggcacgatctgcaaaaactgtttctgtggcggccgcttgcccgagccctgcgcggagccgggctgcgaacgctgacgccggccacccgcaaccgcaccgccggtcacgccgccgctcagatacgggttgaaaaacatagcggaccgtgagaggctgacagcttacgaagcaaaatcacaaagcaaatacacatgcagcacctagatgtccagtttaaccccgtatatcacaagtctctgtcactttttttgtctagtttttttttctcctcttggttcagacgttctcttcttcgtcggagtctttcaagtgtcggtagccgtttttgcggtgtcgcagtcggtctagcaggttgggcttctgtcccttgtcctgcgtgccagtctgtccgtccaaagaatctgtaccgttctgctgcgctcgctgctctgcgtccagacggaccagggccagaagcatctggtaagcctgctcgttggtgtaaggcggagccgccgtggatgcatcagacgacggtggtcccggtcctttgcgaccagaattataaacactttcctcgtaggaaggcggagcctgtaacgacgtgtctttggtgttgcccgacgtcacggtggtcccgtcggcggacaccagatagggaaagaggttctgcagcggctgcatgcagagacgccgctgtcgagtatagatcaaataaatgataatgacgacggctatggccacgaggatgatggtgaaggctccgaaggggtttttgaggaaggtggcaacgccttcgaccacggaggccaccgcgccacccacggccccaatggctacgccaacggcctttcccgcggcgcccaggccgctcatgaggtcgtccagacccttgaggtagggcggcagcgggtcgactaccttgtcctccacgtactttacccgctgcttatacgaattgaactcgcgcatgatctcctcgagatcaaaaacgttgctggaacgcaattctttctgcgagtaaagttccagtaccctgaagtcggtgttttccagcgggtcgatgtctagggcgatcatgctgtcgacggtggagatgctgctgaggtcaatcatgcgtttgaagaggtagtccacgtactcgtaggccgagttgccggcgatgaagatcttgaggctgggaagctgacattcctcagtgcggtggttgcccaacaggatttcgttatcctcgcccagttgaccgtactgcacgtacgagctgttggcgaaattaaagatgaccactggtcgtgagtagcagcgtcctggcgattccttcacattcatatcacgcagcaccttgacgctggtttggttaatggtcacgcagctggccagacccaggacatcacccatgaaacgcgcggcaatcggtttgttgtagatggccgagagaatagctgacgggttgatcttgctaagttccttgaagacctctagggtgcgccgttgatccacacaccaggcttctgcgatttgcgccagcgcccggttgatgtaaccgcgcaacgtgtcataggtgaactgcagctgggcgtagaccagattgtgcaccgactccatgttggataaatgagttgcattgttgccatctgtacttcttttggttctattatgagtaagattcagactggagcggttggccaaacgttcgagttccaccagagatttttgcttgataccttgccagaacaccaccaaaccaccagtggtttcaaagacggacacgtttccatatttttcatatgtttgattgtatgaagtattgaaaatctgctgtaacttatttatggcctcatcacgtacacagtccagcgcagagtcggacatgttcacctcttgcttcttagataagaaagtggcggtcattttggcagaagaaaagtgatacgagtcctcggcttcggaacgaatggtgcgttccgaggcttcccagaaagtgagttgacaagtaacattcttctcgtcctgtatatcccaggagatcactgagtccgcacgttcaagaaaagccaccaacctgtgggtctctaacgcagaattcggtcttccaaagtcggagacgatagtgtagttcggaaaaatgaaaaacttgtcggcgttttctccaaaatagctggcattgcgattagttccgttgtagaaaggagaaatgtcaaccacatcacccgtggaagttgcgaaaaaatgatagggatacttggagcgcgcagtagtgatggtcaccatacaattcagattacaggtctcacgatagagccaggtgctgccgcggctgtgccattgatccttgaccgtcacgtaacgggtactgtgggtgttggaataatcgtcgggcattaattgcatggttttgttttcatagctgtccctatgataagccacgaaaaccgtgcctgctataacgcggctgtaggaactgtagcactgactgtgactgttgatatgatgaatctcccacataggaggcgccacgtattccgtgttgctgcccagcagataagtggtgtggatgtaagcgtagctacgacgaaacgtcaaaaccttctggtagactcgtaccttaaaggtgtgcgcgacgatgttgcgtttgtagaccaccatgatgccctcgtccaggtcttcattgatgggcttcatcgaggtgcagacgatattacgttcaaagcgaataagatccgtaccctgtgccatagaacacacgcgataggggtacttggtggtgttgacccccaccacatctccgtacttgagggtagtgttgtagatggtctcgttaacaccatggctgaccgtttgggaagaagttacgcgttgagagactgaaccggatcgagaatgagcagcagacgtcgtatgagaggaatggtgactgtgagtagcagaagttccacgagtagaagatgaggaaaccgcagcacccagacagacgatacacaagttaacgcagactaccaggcaccagatcctggattccatgttcgtcgcgggccaaatccagcagcgatgaggcgcgtcgtggtctcttgcgtgttgcgcggaccctccgggaaacgcccgcggtcgaggaggaggggtacggacttggcagccaaggtcggtccggctccctgaaggcacccgagacggccgcggcggccgtcagggtggagggcttggccgcgggagctgttggcacgtcgccactctcatccggtctggacagatgcctgtagaggaggagatatagatctttggacttataaagacttccttcgtgacgaagcagcagcggccactctttgttatacgtgagaatcacatctctgtccgggtgcagttcgtcgcgcaggcacgcgatcgagagttgtttcccgaaagtttcattatatagtgcgacggagagcacgagctcccgcacgtgcatccacatctccttctgcagcacgtttagatcctgacagtccgaaaaattgaaaaaacccatgtacttcaccaccatccactcactgggatacacggtaccttccgcgcatttgaccaaatcgtccttgacgtggggtagtacgcccgcgttgtcgcaggcataggccatgtccacattgtgagagaggggatagcgatcggtgcagtgtgtgaagaggggcccgttacacaactcgtagatctgctgacccagtagcgggagggattccacaggcagactcttgtggatcaggttattgaccacatacaggtgctcatcgtacgtgaactgatcccccacgtccaccacgtcttggtcctggtggtattggctgcggtatagaaacccattcatgagcttagagataaagtccagacacaagggccccactaggttgacatcgatgagtttgctagtcagacgctcctgcgttttgatgcaacggatcaccttgccatagcccacctccgaaaccttctgcaggtaggcgcgtttgcgcacgttcacctcgcgggtgacgttgtggatgcgggaacgcgcgtccaccaagtcgagagcctcgtgttcgtcgcagttgcgcacccgtaagccgttctcgctgccgtcgccgtcctgcccattcgcccctccccctaccgctttcttgcctcctccacgggcccggccgccgccaccgttattcctctgactgtgagtactgctgttgctgctgttgctggccgtcatcaaagtcgtacccgtccccgacatcgcctcccgtccacgcaggtgaatagcctcgccctcggggccgtcgccccccgtgccatcgggcagcggacgtcgaatctcctcgagaatatgcttgattttggtgtacatctcgttgctttcgtggagcttgttgaacaccgggttgtcctcgaaagcttgaatgctgagggatgtgatgaggtcgatgatcctgttgggggcggcaaagaccgaccccacgaacatgcgctcctccccgtccaacgccttttccccgagcacgaagatgtcctccacgtcctccccgtacagatggcgactgatgccgttcatgagcgcccggcacagctggtgatacacatttagctgctggatggtgatgcccacccgcttgacgataacctccgaggtacgggaccagtaggtaaaatccgacaaggaatatattcgttccggtatatccgtaaacaggttgtactccctcagcgcctcctccgcctcctggatgtagctgtggtaggccgatgaagaagagaataggcttttgagggccgaaaggactccagccaagtgggggatgcgcgttgtcaggtccagcaggtcctgctccaccgtctggatattcacatcggactggcttgacggacggtggaccgctatatggttgcacagcaagccctgcagccgcttgttcaacgagcggccctgattcgggatgatggtcagctcctcgtagcattgggcgcatgtcgtcccttcgacgtacacttcctgacgcgccaccggcgagatgccgcataggcgacggagaagctccagcagctgcgcgcagacctccaggccggcctccggcgccaggatcccgtacacgtagttcatcttgcacaggaagcgctcgatgtcgttgagtgtggccagactgacgctgaaacggacgttgtccgtaaactggagctccacggtgtgatggcgatcgcagcgatccaaacggaggacggtacggtagaaggccgcccggtccggctggcgcgagtaggccatcagcgcccggtccagcaaagccgtatcctcgtgcagcgccttcagcagcatctccagatagagcgtcagcagcgaactctgcgtacgattctgcgccaccacctccgggtagatcttccggtacagatacactatagccgccgcgtttctcttgaacggcgtggactccgccagtaacacgttcggatcgcagtactttagacactccagctccatggcgtattcgttgcatttcgaacacactacgcatagtttctgtaacaaattcatctccatgactcgactcgctcacgtacgagacgctgtcgtccggtctggcgccggccagagacatggagtcggtgcacaaataactcgcgggccgctcgctatgccgactgacgttgacgttaatatataacgacgtcgtcgacgacgcgggttctgctcccgacgctgttgccgccgcctgcggcgcaacctcctccaccaccgccgccgccggctcctccgcctcgggcgacgggggctcggagatgaccggctgtgtctgacactcctccccttcctcaggcggcccgggcgccgacgcgaatgtcggagcttgccagcgcggcggcggtctctgtctctggtgccgcggcgccaaccttcggggctgttgctgctgctgatgatgcgacgccgtctgtcgccgctgttgcggcggtagctgatacggtgtcgcctggtgctgctgtgtcggtggctgctgttgttgctgctgttgttgcggtctgaaaagcggccacgggggctgcgactgttgctgctgttgttgcgatgctcgtggctgcggcggccgttgtcgcggcgtctgctggcggttacaaccggctgcgtttggccggcaataacccgctgcccccgccgcccccgctgctcccgccgacgccgccagcctcgtcttcgccggcgttcacgagaaagcagccacctcccgtctcgccgggcacgccgaagcaaatggagttgcccgtgacggactcgccgagaagaagaccgccacccccgacgccggacgccgcgccgacgccactgggcgcgaagagcgccgacaggtcgtgcacctcccccccagcggcgtccgtcaatcgctgggcgtcggcgtccagcacgcgtcgcaagttctccagcgaaaagtcctccacgccctgctcctgcaacgcggcaaacttgtccatcagcgacgcggccagcgcctcgcagccatccacgaagaagagcacatcgtcggacgcggggatctcctcgcgcacgctcagaatctcgtacacggccattacttcggggtcgcaatccaagttctcggcgtccagcgccagcatgacgcggttttttataagatccgcgtcaaaaagcacgttctcgcggcgcgagcgtttaatgagcacgtcggccagacgcgtagccaagaggtagcgctggcgcatgaaacgataatcttggccgctcatagagctcacgttaaggctgcgttccacaccgttgcccgaaaagtagccgatctgcccaaactgatagatctccttgctgttgttgatacccgcatatttttccacgctcacgggcacggtcaccaaggaacgatgctcaaaaacgctccgtactaacgattcacgcgccacagtggcggccatgggcgccggcacgcctgcggtcttcaagcccttgacatgcaacgcaaattcggcgggcgacgagaaacgcggactagcacctaacacgtgaggaaactgcgcgtggttctgcgtcgttaagcgcgtcgttaacccgtgcagcgagccgatgtagtctttgaagccgtagtagcagaggaatttgttatggaaacggctttccacgtaactcagcacacagtctggcgccacatccagcagatcgtgctcctgatagtcagccgtcacagccaccagaaatttgacgaaagcattgaactcgcccatgtcacctatgggcacattcttgggcaacgcgttggaacagaccttctgccaaaactgtaagcaggggagaccacattcaggaaagagtcgctcgtgatgtcgatacagcagaaatcccaagcagcccttagccggattacgacgcggaacgtgatcgcggcgaaaaaacacgctacccgcgttgcccttgcccgcgcggtagatgggtcggtttttcacccgcaccatgatcaacgtgggtaccgacagccgcgagagcttgatctccatgggcaccacggcgtacgtgccctgcgcgtacagcctaaagtccagcaggcggtcgtgatccgaattcttggacgacttgatctgcttggtgaagagaaagcccttgcgcgacgacgtggtagagaacgcgccgtggatggattgaaagtgctgcgtcatccatttggataccaagttggtggtcaacggattgtccacaatgtacgaggtagcggtaataagcgccacgttctggatcacgtaaaagacggatctgaaataggcgtaggccagcagcggctggaaggccacggcgtagggattcagatccaggttgaaggcctgcgtggcgcccgccacctcgtcgcggctgctcttgaggcgcacctccgaaacgaaacccagggcctcgtcgtccacaaacttgttgagcgccgaaaagacggccacaaagtcgcttttgccgtgcgcgctaaaggtatcctcgcccgtcacggggtcgatgagccgcatcttgcggcagtaatccaagatgcgattgagccgataggtacggtccacgctagcgcccagcatgcgaccgccgcgccccatcattcccccggaatccccgccacccccaccaccacgaccgccgcccagaccgtcgctcgggcccccgctcacgtctcgtccaccacccccgccagcaccgccgcccggaaccccgtcgtcacctttgccgtccaaacccccgtccttggcgtcgacgttgtaacgccgaccgaagctgcccaaaatatccacgtcgttgagaaaacgcgactgcacggtgatcacgcagggctccttcttgggctgcttgggcaccacgggcaagcgggtgcgcacccgcacgaaggccgtctgataacacgtgtggcaacaagtacccccacaggcctcgcacaaccccgcggcgcagcccaccaggtgattcgtgagcgtcgacgaacccgacaagcccgtgttatacaccgagacacgatttagataccagacgaagcccgaaactagctgcggacacgtgccacacaccaacgccaaatgctgcggcccatagcgttcgtccttgagcggcgcgccttgaaacttgagcaccttgcgcgcgtcgttgtagacgtcttcgcaggccgccgacaacccgttggtgaactgaatagccttgagcaacgtctcctgactggccgtaccgccggcgctgggatgccgcgccgacgactggagatacaccagcctgtgctggtagagcaccgaattagcgctgaagaccaaggcggccacgtgcgtcgagagatgcaacttgagctcggtcagcgcgcggatcagatcgcggtgatcggttgcgttggtcactaaaggccactcggaaaagagcatagactcggcaggttggtaggccgaatcgaaaaataccgaggcaaaactgaaggccaactcgcaaaccaccgcgtcactcagcatcagatgatccttttccagactgctgagtcgctggctcatgtaccccaagtagcgcttatgtggcgccagcttcaccgactgctgactgtcgtgcacaaactgccgcaacgccgcctcgatcagcacacgcggctccgagaagcgcagcgattgacaccatgacgtgtacacgtagtagaaaagcgtctcgcttacggccggcacgtagagccctcgcgcctccacaaaagcgctgcgcgcatccagcgagacctcgtcggcttcggcgtcaagctgcagcgaattaaagagcgtaggcgggtacaacggcacgcgcaccgcctcgccgccgtgcagtcgcaccgtggtcgcctcctccacgcatggaatcagctgaccggcaaagagaaactccttcaagccgttgcccaccaccacgtgcacagtcgtctcggacgcctgacagcccaccgccgcgcacaacgccgccagatcggtaggcacgcgatccgcctcgggcgtgtaggcctccaacgcgtacttctggcgggcgtcctcgcacagccgatgcacgtctccgtgatcctcggtaaaagccacgatgccttgcgtatgatgaaagtagagcgcaaaaggacagaaggacgtgactttcgtgagcaccccgccgtcgtaacaaagcacaggcgtacgcacagagacgccgaaatccgcctccaccgtgagccccgccaacagaggagcgatcaccacgctcgaggaacggtcgcataacgagagagtggccagaatctcctgcgtttctgcgttcaacctgctgaagtagagaaaagccgcgggccccaccggcgctagcgcggttagttcctcgtggctcatggtggatgaacggaagacaatggctacgccgccactgagtgaattttataccaaggaaaagttcagcacgtcatgtttgacgcacgacgtctgagacaccaccgtggccaccactgcggtctggctgcggttgcggaccaccaaaggcgacaaccgcaacgatcccagcaattcgtaagaaaagctaaccgctacggtcgggtagcctctcgcagccagaccgctagccgacgcacccgcccgcgaaaatagcgtgatgttcgggacggctttgcgtcaccgccaactaacgtcggtagtcgagcacgtcgtttatcctcagcacaccgtccgatcacaatccgttttcccactcagtcgcacaagcagcacataaaaaccccacacagggcacgtgaaaacaccgtccctagaaaacggtgttttctgtcctaccgtcaccggtatacacaggcaaatcccaagcccgatccccgaaaacaccgtacggtgtttgtgacctccaaaatcacatcagctaacaaaccgtgaaaagtcacgtttcacgaacacggtgtttttaaatcacaaagaaccgcctgacggtttacaagcagaaacaccgcaccacggtggtacaagcgcgatgaatctggtctcgcaacctcaatcgccgctatcaccaccgattttcgctgcgctccgccgacaaaacgccgtacaagctacacaccccaaaaacccgcgcgcctacgggcgccaaacctgtgtattatcccaacgtcacaacacgacacaaaccgcgtaacgtggtttcccgaacacgtacgcggcacagacccccgacacgtactcgaagaccttacagtttacgagtcaataaaacaggaaaagatccgaactttaaaattgtgtatttttattttcccatccccctctttttaccaaaaaacacatttttcgtcttgtaaaaagtaactttcgcccattgccatgaaacaccgtgatggggaacggtgttgtgtgtcgactgacgtcactacggcgatcagtatcgacgtcgtgtatacataacggtgcccggtgtttttattcggggcgttgtcgcgtcttgatgtaatgtaacctgaaaccgccgtgcccaagaatgcggaagccagcgtgtactcataacggggttttgggtacaatctgacgacatctggcggcgagcgtacaccatcgaatgtggcgatcgccggctctacgtcacaatgacgcaaaaacacactgtaaaacccgcgtagacagctttcctggtcaacgagcgccatctggtgtcggcataagaacaggaatcaaccccgtggccggcgaggcggtgagcacttttcctggtcacgtgaccatcagcgcaggaagcgaggcccgtagaaccgcccaagaggcggtgccagatgccaacgtcataatcacaaggtgatttgttacgtcacgcgtgtgcgcacgcacgcgcgcacgcgcgcggtagaatacagcgatccctagtgaagccacacccattacgtgtagccatatccgcttacgtatacagccacacccctaggtacgccaccttatctaccaatcacagaaacggatatacaatgacccctccctagactccaccccttgtacggaaatttcagataggtggaacccgttagggttccaccgtcctcggtgtacgtacaggcttctccgtctaccggaaatatacacctgctgacgtagacgctactcccggatacgcgtcataagctactggaccctaggggggagtgtctacagggctacgtgcacgcccccttacctagggtatccgcccccttcctctgttttgacctagtaaacttaacgccgccgcttctcacgtgacccctgacaagcctacgtcacactcgcgtaaccacacccactccggatatacgtcatcctgtggaattccggacatacggtgacgtagcgagcgtagcgagctacgtcacgtatgcgtgcgtcacctccggcggaaatcatctctgatgacgtagcgagcgaagcgagctacgtcatcagtccgttctacgtataccggatgctaggcgacgccccgtaggggcggagcctagcttccacccctaggatgcataccctatatagcataattcttctaacgaaacgttctacgaaaacggactggcggaacgggaaccaccgtaacccccccccctcacccccccccttctcctccggaaccggggggggcaaatttttaccaaatttgggcaaccatgatttccaatgggacggcgtttccgtgcgcatgcgcagtcggggcgaattttcggttaccagggcgttaccacgcggattatgggatggggactcgagtgcgcatgcgccggggatgccgtatggagagcctatatataaagaggggtgaaccaggggccccggtgcgcatgcgcgggtcctggtccgcgggagggtcgtcctgcgcatgcgccggtaaaattccactgggtgtgtgtcgtgcgcatgcgccagtatttttccactggaggcggtcagtgcgcatgcgtcggtaaatttccattggatgcgcgtcgtgcgcatgcgccggtatttttccactgggcggccgcacctagggagcgcgagccccgtgccgggcatgggccgcggcggtggaaaattaccgctccgcccacctaggcggggcctctgaaaacctataaaacccggcgtgcccgtcgccccccggcgcagtccgcggcagggttccggccgtgctgcggtccgcacgctgcgcccgctcccgcctgcctcccgccctaccccccaccctccccggccgaggcccggcgccggtccgtccgcgggcccgtcccaccgccctggagcaccatccggggccgtgggccgggcaccgggcgcggcccgctccggacctcggccgggggtccctcccataagcgctaacttaagggttgaaccatctgaagaatgcgacgcctcggtgcctcgttaagacgatgcctcgcgttcttcaattgcgttttgtaggctgtcagggatactgtcccacgaatggccacctgtaagctccagatgaccatttttgttattctccacaacgagttagttcttcttttcggatccggcacttctgggggggaaatccagcgatggctggattatgtcgtcaattaaaaatgcggcgagtagattagcaaatatccacgctttcgcgagttcaggttcctttgcacgcaaagcatccaggtgcagcaaacttttgagccgcttaaaagccagttcaatttgccatcgcagacggtaacaatcagccacttgctctgctgaatattcatcttccggtaatgatgttagcaatagcacatggcccgctgcttccagcgtttccgcctgaactactcgtccttttcgacgattctcgctgagcagtcgggttttactgattaatgctttttcgggaggaagtgatacggcaatgagacgtgccggaaagggagctccggcttttttattacctgaattgcctatcattacagtggtttcaccgttcttaccgcaatccagcccgcgcagaaaacccatcatgtcaaagcgcattccttctgcagttaaccagcgcaatcctcgccagtgaacccggacgatataatcagcttctccaaaagcaagtgagcggatacattcgggacgcgaaccgaatccccggtcagcaatgcgtatctcgtctgccgtttgcgcaaatcggtccagccgttcagcgtctctgctgtcggttagctcaaaatcagtgaactgacaggtatgaggatcatatcccatatgtagtcgccattcagcgctgccgcccccgggcgcactgattgctgttccatcgacaagacgcaatctctttccgcttgtacaacccgtaactgcggcgcgtacagcaagtgtttgtgcggcaagtatgccaaaccagtcggcggcattccgcagccgcttcaggagagccacgtcagataatgttgcaacgtcatggagctgagcccatgcagtgacttcacgtaatgacatccccccggggccgtaagccagccccagacgtagcagagttgcagcatcacgaatttcgcggcggcgggttagagccccggcattacgtgccgaagtatccagttcttcgggcttaccaatatgggccagaattgctgaccagttatcgtgagagtaattcatcggcacgttaaatcatatcaggcgtaataccacaacccttaagttagcgcttatggggtccctcccctccccccgctcgaccccccatccgacggcccggccgggctgggacccccgcaccggggtcccggttcccgtccgcggcccggggggacccgagcgggggcttcccacccccaccccgctcctccccgggctccggcccgggatccctcgctgctcccggcggcctccgccggcttcccggtccacccgccgcggaacggacgggacccggggtccgcgcccttcccctccccccacggggggctgggtcgcggaccccggttcctaggctcgttccgcggtgggcgaccggggatcccccaccccgctcctccccgggctccggcccgggatccctcgctgctcccggcggcctccgccggcttcccggtccacccgccgcggaacggacgggacccggggtccgcgcccttcccctccccccacggggggctgggtcgcggaccccggttcctaggctcgttccgcggtgggcgaccggggatcccccaccccgctcctccccgggctccggcccgggatccctcgctgctcccggcggcctccgccggcttcccggtccacccgccgcggaacggacgggacccggggtccgcgcccttcccctccccccacggggggctgggtcgcggaccccggttcctaggctcgttccgcggtgggcgaccgggatcccccacccagctccccttcccggctcgccccgctggcttttgggcccctccgggctttttttccggctgggggtcgcggcggccggccgacgacggtaggtgggccgggcggacggtggtggggacgggcgacgccccggctcgacggcagtcggccccggagggttgggggctgggggcccggtcaggagctccgggagcggggtcgaccgcgacggcttccgggtctcgcggcggctccctctcggcggctccggttgggctcccctcccccctctcgagggtccggtcgccggttgtggtcgggggtccctcggcctagccgccggctctcggtccgccttaccctgggcgttggccggtcccgtgacgctcccctcccccgctgctccccaaaaactccgcccgaaccgtcgcggtttgctggccctgggcgtggtctccccactcccctccccccatcggccgcccagccggggtcggcgcctcggaccccaccaggctgtggcgtgtgtgctggccgatgcggcggcgaggttgggtgtggccggaagcgctcggggtcgacggtgggccgccatgacacctcaattgccgtcagtacgcccctccacaatcaccgtccccacacgatgggcccggcagttcacccaacgttggttcaggcccagtcgggtttttccccggtacgaacgcacgtccccgtgggctccacgcgttttccaccctttcctggaggggtccggaacaccgtgaatccacggggagggtcccggcacgggccgaggagaccacgaccgtcccacccggcgtgtcgactcgtccgagacccgggaagggaacaggccccaccttttttcccttctccgatttgccgtggaaaacccgtgaaccgatacgggtgcagacggccgaaaaaattcgagacggcaatacgacggcagggcgtgattttctcccccacccgacaaaaccgtgtccctcaaaattccccacctttctctgttcaaatggccccgaaactgtaaaacaccgtttgaccgcaccccaaccggcgccatcttggtgaccttctcgacggttctctcgctcgtcatgccgttctgagctccgacatggcggacgagagaaaatggcgtcgagagccgaggagcgttttcgctccaggcgggtaaaaaaatagcacgataacttttctgtgcttttttgagacgtttttgaagagctttttttctgctcagagcgaaaaaatgatagccctgaaaatctcgacgagtctggccgagcggcgccatcttggaggaggggcgagtcgcgggcaccgcctcggtaccccctggccgaggcgagtccgcggtcgccgcctgttccgtgatgctacctagagggcgccgtcgaggcgactcttcctgttttcgccctgagggctaacggtcgctgacgtcaaaccatctcgtgctcgctgagtcacatccggttgttgacaagcgatggaggaccgcacccaaagtgcgccctctagtcatcgcgcctgaccccttttataaactgctcgaagaaaagaacaccttatgtgaaaaaatacagaatgatgacaagttcattcaacacaaccgctcaacaacgccatatctatcagtgtccaaaaactatcttctatcctttgaaactataaatgctgcctatatacatatttagtatccaagactcttaccacgtagacgaaaagaagtgatacaatgatcttgacgtgtatcgtctatatcgtgctagatatattcagataagacgcgcaaaccatagatttctcatcagtatcatgaaagacctatagctctatatacgaacctagtcattttaggacagccgccggagaagccgacgagggatcgggcgggtgcagccagaacctcacgcccgatcccgcctccggtaggcgatttgcatctgtttggtaaaaagctcataagtctgtatgtgacctatatatatattatacgctatgtacaccgaactgtcgctgttgtataagaagaaaaaactctccatatttatatcgtctgaatttttgcttgatagacacgtgtttggaactctgtccccccacgttttcactgtgtataacaaaaatatgtgtttctcaaaagatcttgaggtgtttgaaaacgggggaaacctgcgtttgggtgcgctaagccccggactgggacgtagccggcgtccggcacctatatttttctattttttttttacaaaatatatgatgaaccaagaataaaactctagctctcgtctatttttaatatgctctacttagaacctttttaatgacagaatgaactccatgttatacgctctttatatagtttctctgcactaacctttaaaaccgtatccttccctgttgtacaaatcatcttttgatacacaatgatgacctgatatccctccatatatatgatcggatattattccgttagacttgtcctccttttttttcctcatctcctgtatctggagatatatgttgaccaccaccgccatgaccaccaaaaagctagccgtcacgactagaaatgtgtaggattcggactttccgtttgagaagaaagagaccgcgtctctggacgctctttttgtcggtctgaatcgacccgggatacgtaagagagcggccctacatcggggggcgctcgagaccgacgacgttccatctgaccagaaaaaaaaaggcacccctcggtggcgacctctcaccatcgtttgcccgtccgcccgtccttcgtagccatcatcatcatctcaggctctatcggtaccatcgttgtcatctgaaaaaaaaaactgcctcacccacctgcgtaaaaacaccatctttccggaggtgcggtaagacgggcaaatacggtcgtgccgaggcaaaaaaacgcaccatcgacaccacaccctcatgagcaccacctgtcggtgttggtcgtcctccatcgttctctacgaacatctcgacgcccgggtgacggacgacggcaagacgtcccggagaagacggtgttctctcgggcggtacgctctctggatctataatatctatagtagctaaacgagactgtgagtacgacgaaccacatcatcttttttttatgttgcttctttagaaaatgacttatgtcgacgacactcggcatcagccatctcgtgaaacacgctcgcttttcgtctctccaaggaacactgggtccgctgaaagggaccgtgtaccgaccaaagcaaaaaacacacacgtagtaacatgatcaaccacgtctgaatgacacgaaaacacaatcgtataacgctctattcatggaacgaacttggaataaaaaaaccatcgcaggccagaggctaagccgaaaccgtccggggaagcgggcgcgagttttccgacttagtctctggtgctcgttgagcctcttttttttttcctgattctctgaagaatcaccgtcacagccctatgacgcgaaatcaattgctagaacataaacgttctcaacaggtatgaaatgaacaaactagatgatgctataaccttatattgtgtgtatatagataggtgtgaaatttgtaggataaaaagtgtcgttgtatgatgcacaacgatcgtgaaactggagactgtagctctctaccgaatgcaaatacacaaatgacatcgattcccgtccccacataaagaaatgtgctttactgtgaaagaatgaagaagattcttgttcctcgtacgacggggccctcgctcgtcgtgcctcttcccccctccgggagaggggacgtcggggccctccgtcgcaccgggccgaagccagtgaaatgtttactacactgtcatcagaatatatgatgtatattatttcctccaaactcctcaccatagccaccaattcgcatcacttaagaaagtagtagcaaccgcggcggcggcgaccggccggtcgtcgtctcctcgtcctcaaatgttgtacatgtgcagaaaaatgtgtaaatacgtgttatttatcccatgcgtcttgtacatagatatatgtttttatatacgctatttatactttatatatccttttgcataaccatagacagtcaaggattttaatgatttgctcatccgcctttgagccatcgcttaggagttagttcctctatgttctcggcccaccttttcgactacagtagcaaacccttgtactaccaccccgataaaaaccacatcatcatcgtcaccacgacctggaaacgacacacgttcccccccaatcttgggcatgtgtatatataaaaagaatgggagggagaggacgtggggctcgagaagaaataaacgccaagctcgattcgaaccaaaaaaccacatgtgtattgtgcttttttttttttttacggtgggggaaaaggagggggccgtcattaacggaaaccgtgtatggggtccggacacgaacagtacacagcttatggggaaaaaagctcacagagagaaaaaaacaccaagctcaggcacgcgtacatcattatcatcatcggatatctcaccacgggtcatagtagtaccaaggagtgtgtaacaccattttttcttttctttgtaacgggataagggacagcaatcatcacgcacaacacccttcactctctttttagtcatccatatcatcgctgtaacacagcatgtcctcgtaatcgggcgtctggcagcgcattaccaccgagtcgtcttcttgcggtaccggtggtggtggcggcggcggctgctgctgctgggttgccgtcgtactgtgattaccgttggcggactgcacagggatgatgggctgcttgtggggaacctggggtggactgccgccgtgagaaggcgacggcgtcatcaagttaagatcaccacggtgactccggacaccggcgaggggcgccgggggactgggagggaccgcggtcgtcttgtagacgacggtgtccccgtgtcgatccgtggctcgtaccagatcttgactgctagcgtcgtcactgtcttcgtcctcttccagctcgccctcagagtagtgctgctgtggttgcgacggtggctgggcgggaggagcggcggcggcgatcattggagagggatgtcgatgactcccttctctgtcttttttatcgtaggctgtcagcgttgctgggtccgtcctgctttccatatttgtgtattgctcatcggtgggatgaatttggtctcctccccgctgttgtccgccggcagtggcatggttgctggcggttgtcgttgtcgtaccggcaaagacggtgagatccaatagcgactgctcgtcgaagggacagtacgctatcatgaaacgatagggtgccaacgcgcgttggatgcgcagttcgcacatctcgttctgacactcgtggcactgcagggcgcctaggatcaggtccgagacagcgccgcagcggtaggtacccatggcgttgttagtatcgaactggtcaaaaaattggggcgtaccggtgacttgcaacgcgcgacggcgtagcgagacggccacgcgcgagaaagagcacacgtaggccatggcgcggtgcatgggttgcgagaaggtctcgggcggacgcttctgcagatcgcagacgtcgtcgcgtagccaggcgctcatttgaccgggcttcttgactaaccgtttgagcgtgctgcaatggtcgccccagccgtcctggtggtccaggatgcagcccaggtccaggttgttgagtttgttgaagagcagctgacgcatgccgcccaccgtctccagatagggatcgtgcgggttgacgggtagcccgtgcaggtggtggtacttcatgtagctgagcgtttcgtcgatgatggccagcaatgtgtgtaagttgggagcgttgtacacggcgaagatcttttccaccaccagcttgcgcagcaacggttcctccagccaatcgaactgttgacggatgtgcaacaggtagtcggtgtgcatgagctcgtcgtgtgacagcaggatgcgaccgcgcggctgatgatcttgcgggaaggcggtggggaccttgagatcggcggggtagggtgccagacgtagactctcggccgtgtagcgctgaaggtcgtagacgggcgaggtagaactcggtgaggtacccgacgaggcggcgccgcgctgcagacgcgctctttttttcttttcgatcaaacggctgagttgctgtagttcgtcctcgtccatggcgtccagttcgtcgtcaataagcgccagcatctgttgttgttgcggtccggcggacgatccgtgatgattattggctgaggaggggtgagaagaaccgaaagtcgtaggacaactgggaactcggcgacgaagatgcgtcgaatcgccgccgtgatggtgcggttcgccgtcatcgttgtcgtaagacttaccgtagtgggggttaaggggcaccgaggcggacgcggccacgcgtcgcttgaaagaggaggacgccctatgtccgccacggaagcccgcggtgcccatgatgatgtgtccgccggtgcccccgagtgcgtggcgggaggagggtggaaggggaggaggatagtggtccggatcgccttcggtatcatcgtctttgctgtagcggggtcgtcgtgcggggacgcagggtcggtgatgatgcgaggcggcgccgacggtatcttccgcgagatggtattcgctggcggctgctccgttccgtgtcgacggcgaggttggacttcgctcgcgtcggaacttccgtggcacgggttcgtaatccagacagaagcgccgtgcgcgacgggcgcggcgttcgcgctcgctcagggaagataacgacggagcgtcgtgacggccgcgtgagtgcagctccatggccgtcgtcgctaggaaggtcacgttcgggcacgctgatgtatatatagatgagaccgctgccggggggcgggtcaccggcgccgtggaaagtgaggctcagacggcggtcgccggcggcatgggcgcgtcgggcggtctgattttgatggaaatgtggacgtttttggcgttggagtgacactttttggtgaaacagcggctccagaggctggcccagagcgcgtagctgtgctcggtgcgcaggtcgatgaacacctgcacggtctcttgcgggttgcggtgcgtgtagttgagacagcgaaaatcccgcgtgcgcgcgccgtcgcgccgcttgacggccacgcagcaggcgccgtggggctgaaagaggaggacgtggggcgcggtaaactgctcgctgacgtgcggttcgtagtgttgcgtgaggtgctcgagcagcggcggccacacgcgggtgacgacgagccgctgcaagtccgtgtcggaaatcgcagcggcagtggcgccgtcgccaccgtacaggtgataggcgagcacctcggtgagaccgcggcgtcgataacgcgtcacgttaagcgagcgcgtttcgatgaagttggcttcggtcgaggggcagattttgtcgcgcacgctgagaatgacgcgcggcggcggcgacaggggcaacgcgggcaggtcgtgcggcgggtggtggtgaagcaggttacgcaggtccagttgggcgcgcacaaagcctagcgggtgttcgcggtaggcgtcgggcacgatgaacagcggcaacagacggcgatgcatgaaatagccgtcgtcttggtccattttatacatgtagggcagacgtacagagcgtccatggtggtagatgcctgtgtctaggctgctctcgggatgcgagatggggtccagcagcgtgtgcagttcggcgtcgagacagacggcgtgattgagcacctgcgccacggcgcgtaaaacgctggggtgtacggcgacggtgcaggcggggaacggcgtgatgatgcgcagccccagtttgcccttgcagcggcagtaagggggtgacgtgtcaacggaggacgttgttttttgaaaaacgccgttatccgggacgttatttttattctctttcccgtcttcgtcttcctctgtgtcgcgctcgtcccggtaatcgagatagtcgtcgtcatcgaaaggcgcgccggccgcgtctacgggcacgctgttgggtgggcacgcgcttttgaagaaatagaccgggtgccggtcggggtgcgtgtagccaaagaggctcgcccatacggtcatccagacgcgtcgtagtccgcgacataactcaaagacggtgtgtcgcgccagaccggagacgccgtcgcgcagccgtaaatcaaagtcggccacaaaattgaagacgggcagacgttcgttgaagacttcgtgtcgcgtgtagtagaactgtgtctcggggctggtgctggccacgtcgtcgtcgtgtagccacacggtctcggtcagggcctcatccgagaaacggctgtcgggtacgtgacggagcaggtcgcgcggaaagaggctgcgatgccaggtttcggaggccacggcgcagaagacgtgctggtcattgggcaggtgtacgcggtagacgggcagcggtcgctccagcagcggtgccagcgcgggctcgggtagcaggtagcgacgttgcgagtaacgcgttagcgtgccggtggtgtaggtctgggctgtgcgtagcgaggcgcatagacgtaacaaaccggacagggagcgttccagcggggagaagacagactcggaaagcgtgttgatgcgttcgagctggcgcgccagctgcgtggaggtgccgaagaagcccgccaggtgcgtgccgtcgatgcggccgccgtagccggccagccccaggccgtgcgggctggtcgccgagtggggggattcgtcgaggcgcagtaggtgcgtctccacgtagtcgtgtagaaagttgtcgagcgagaagtatttttgcatgacgtccagcagctcggtggaaagccggcggcccagaaaacccggttcgcgcgtgcactgcgcttcgggcgccgcgtcagcgtcgtaagccaccacgcgccggtactcgagcaaccgcgcgcgtgccagcgccgtgcggtaggccaggtagacgtagtgcacgcagaccgtgtcgggcagacgcgcacgttcgcggaacgcgttgatctgcgtgtccacctgctctagctcggtgtagtcgcggcggttgcgcgccacggcgtacgccacgaaagcggacacgcgctgacggaagggcgagcccagtagcagacgcgcgaactcgcccatggaggcgtgcgtggggatgatggtgcccaggtcgcgcgtgcagaagctgcgcacgtactcctccacggtggagatggtgctgtactggccctcgaataggtagtaggccatggtcagcagcacctggccctcggtgtgcccgaagacgctgatgaaccacgagggcgaggtggggcagaggaagacctggttgagatgacgtagcacggccgcgtggtgaaagtacaccaggtgcttgaattcgcgcacctcgccgccgtgttcgggcgagagcacgggcgtgcggaagagatgccggtagagcggctgcgtctcggcctcgtccagactggcgataagcgccgagagggggatgggctggcgcgcggccaggtagcgcgagagctgcagcgtttcgttgttcacggcgaagacgggcgccacccgccgcgagtccgagcacttttgtgtctgtaggcagaaataaacacgtcgcgagacctggtgtttgaccagcagggggaagacgcagtgatccgtcggtgtctgcgagagtacgttggcgactatatgagcagaatcatactctgttgcgaacagaacgagcgtcatcgtcgcgccggcacgatgcagctagcccagcgcctgtgcgagctgctgatgtgccgtcgcaaagccgcgcctgtggccgattacgtgctgctgcagcctagcgaggacgtggagctgcgcgagctgcaggcgtttctggacgagaactttaagcagctggagatcaccccggccgacctgcgaaccttttctcgcgacacggacgtggtgaaccacctgctgaagctgctgccgctctataggcaatgccagagcaagtgcgcgttcctcaagggctatctctcggagggctgtttgcctcacacgcggccggcggccgaggtggagtgcaagaaatcgcagcgcatcctggaggccctggacattctcatcctcaaactggtggtgggcgagtttgccatgtccgaggccgacagcctggagatgttgctggataagttctccacggatcaggcctcgctggtggaggtgcagcgcgttatgggcctggtggacatggactgcgagaaaagcgcgtacatgctcgaggccggcgtggctgcgacggttgcaccaccgacgccaccggcggtcgttcagggggaaagcggcgtccgcgaggacggggaaacggtcgccgccgtgtcggcctttgcctgtccctcggtttcggactcgctgatccccgaggaaacgggggtcacgcgtcctatgatgagtttggctcacattaacaccgtctcctgtcccaccgttatgaggttcgaccagcggctgctggaagagggcgacgaggaggatgaagtgaccgtaatgtcgccgtcacccgagcccgtgcaacagcagccgccggtcgagcccgtgcagcagcagccccagggacgtgggtctcaccgtcggcgctacaaggagtcggcgccgcaggagacgctgcctacgaatcacgaacgcgagattttggatctcatgcgacacagccccgacgtgcctcgggaagcggtgatgtcaccgaccatggtcaccatacctcctccccagataccctttgtgggttccgcgcgtgaactcaggggcgtgaagaaaaagaaacccacggcggcggccttgctgtcctccgtgtgaacagcctggcacgttttggaaaacgtacgtgatcacggacacgacgagtacggggtttctcatagacgtactttattaggtcagggatgacggggaggtttcgggccgacgtcaaaaataacgtcactcgtgttgacagggctttctgcgtcggagctcttttcatcttcttctgtctcgtcgacgtcatcgtctaccggcgagggtgtccgttgcaacaacgcgtgctcgggcgtgtgggtgaaaccgatgtcgggggtgggcggcacgatcatctgtcctagggggtgactgcccaccggcagataggtaaagcggtgggtggtaaaaaccgctttggctacggtggtgtgtggggagatgcagacggtggtgtgcgaagtgttgaccaccgtcacgccggccgcggtacccgggagccagatggtgggtcggatgatgagatccgactgactaaactggcgcacgcccactatgagggcgcagataccgggcgcgtgcacgtaggccgcgtcaaaatagacggtttgcgtgtgacccggaccgatcaccagcgtctgacgggtacgtaatgaaaagaaacggtgttcgttgggcggcggcaagttcatgagctgccaaggttctggcacaaaacaggggaaaacgccgatatcgccttcgatggtgcctggaaagatggactgaaaagtgtcgttgaggttgacaacatccaactgcgggacttgcagcccggattccagcagctcgggcatgcaaacgaattgcgcgtccaggcatttgtaaaaggtaatgccgaaaaaaccttcggggatatagaggctgacgcccagcgaggtgggcactttgcgctcgcgtgatagccaaatgatgtgtttattgtaaaaggccagctgcgtgtggcattgtttgacgatgaaactggaaggcatccacttgtagggaactttgagcggcgacggtaatggcgacgacgcttcatcttctcccggatgctgctctttgtcgtatttctcctcggtcgattggggcagcgtaaatgtggtttgaaaatcgctatcgctagcgaaacgtacgcagtaacgcatgttgacggatttctcggctaggatgatggagcctgatgacggtgcggactcttccttcattattaacgtaggggtctcccagaatcgctgaaaacgggagcgcggcagccgcgacagtaccagttgagagtcgattcgatcggtaaacatcgtaagcatcgtggcggtggtgtgatggagtggaacacactagtactaggtcttttggttttatcggtagcggcaagttccaaccatacgtcgactgctagcacaccgagtccctctagctctactcacacctcaacgaccgtgaaggcaacgactactgcgacaactagtacaactacggtgacaagtacgacttcatcaacgactagtaccaaacccggttccaccactcacgaccccaatgtgatgagaccacatgctcacaatgatttttacaaggcgcattgtacatcgcatatgtatgaactttctctgtccagctttgcggcctggtggactatgcttaatgctctcattctcatgggagttttttgtatcgtactacgacattgctgtttccagaactttactgcaaccaccaccaaaggctattgagggtggacaggttcacagcccggcggtgttccggcggggtaaggtttccatatgtggacgactgtaggctgaagttacggatttcacttaaaaacagcagcgagtctagataatcccacatgggatctataaacgttctctgaaacctcgtcgatggtgacgtaggtgtagttttgttattatcggaagccgtttcgttttccacgggcatggtgtcgttgtaatataaggagctcatgtcaagagtaccgtaaatagtgtacggtgtttcgttgcgaatcaatacgtgcgtatttttcataaattctgatacggcggtccggttacggtttggtttacaaaaaggttcatctcgatagcgcagagtagtatacacccacgtcgctagatcttttaactgcgtggtcagaatggatttcataaagttttcgtcaggacgataaccaattgtagatgtgggaatccgagttgggacaataggactataagttacattagtactgacgttaaaaatagttgacgtgtaggaagaatatggtgtggtggtgctaacacgacttttcttactgatcgatttgacaggcgcttgtttacgtttaagctttcgcatagtgttcttcagcttggtgctgttaatatacttgggaacgcggaatatattccggctcatggcgttaaccaggtagaagctgcgtgtacagttacgttgcgcgtaacgtagaagcagggcggctaaacctaaaaaataaattgtttggctatccacattgactttactcggacccacgtacagtttggtgttccaacgtggtacgttaaaaaacataggattaaatgtggtaaaattgccacagttttcctccccggtgttgttacgccgggatacatttagcatttcagaaaggcaagtcatggaaggtatcgtaccacaggatgggggtcgaaatgttattttttgccctgtatgattatattccgaatacacatatttggccggtttacggagttgggtcgtgtgaaaatcgaaccagaggtgggtaatgctatgattacgaataggtcctgctaaaatggaattcgggggaaactgtttcatttctacagttatgttatacaacttttgctgactaggaaatgtgaaaaacttgtaataatcacctgtttttgacgctagttcttgcagtatacgtaattttagttgcctctcttcctcttttgctttctgactctttactcgaaaacgcgctaccgtgatcttacagtttatgaaagagaatagcaggaaagttagcgacataaggaaaaataaattaaaaacacctctcatctctccctttctccccatgacagaggaggagaccccgcaccgtccgtctgccttgtggtttggcttgcctgcgtgtactcactgctgattctggtcgttttgctgctcatctaccgttgttgcatcggcttccaagacgacctagtctcccgcaccttggctgtgtaccgagcttgtatccaaggcccgatatgtaaccagacccacaacagtacctcgtaaataaagacgcacagacctcacacatatagtaccatcacaccgtgtggcgtgtactttattacaacgagcaagagtgcccctaagtattggggcccgtaccgttttagaagattttgtgtgaatgtctttaactttctctgtcccttttctcataaactgtcaggttctacagtcagcatgtcttgagcatgcggtagagcagatagatgccgatgatggccgatagcgcgtagacggacatcatgaggagacgactgtcggtagcgtccacgacgacgtcagttacttctaggaccgtaccgtttttcaaaagcatgaggtagtgagttcgcggagatgagaccaccacttcgttgtagggatccagggcgaaaaggacgtcgtccgagtcgtgcatgtacatgatgttgatgacgccttgcgtgtcgtcgtattctagtagggcgctttggcaaaaggcgcagttttctagggaaatgttgagcgccgctgtgatgctgtgtgtggtatgcatgttgcgcgtcagttcgcatttagtttgactgtccgtctgggtgatgatgaggctctggcctacgacggtggtggagacagggtaggagatacctttgatcaggtactggtttgttacgacataactgacgtgttcggagacggtcagcgcggagaaggattcgccgagcggcagacaaaacaggtcggggaaggtttctagcgtgcttggttgcatggtagataggatggagagggcggcgggaacggtagtggggacggtggcatcggggaagagacgtgtgaggcgttcgagcgagtgatcgcgtcgcccgctactggaacagggtgtgtacaggtcgctgaggtattcgtggtgcggatgagctagcaactgcgtaaagtgtgatagctcggctaatgaacagaggcccgtttctacgatgaagatttcgcgtctctccgtcgtatgtactagcatggagtggacgaggctgcccatgaggtagagttcttgacgcgcgaaggctgaaagaaaagaggccaggtgcgttttgtgtagttttagggcaaagtcggcgatctgtcgtagtgcccactgggggatgagatgttgctgattctgtttagagagtatgtagaccaggcgtacgaggctggtgatgtcggtgatctgattcggtgtccaaagggctcgtttggccaggtccacggccgtgggatacagcagcaacgtggtgcgtggtggtgtttgtgagaggcaggtgatcataaattcttgtatttgtaagagtgcggcctggcggtctagggcccgtgggacggagacttgggcgccggcctcttcttgtcgggctgctgcgaacagtgctaatgcgtaggcgaaggccatttctaccgtgcggcggtccagcatctgacatcgaccgcttttgagtacatccacggcgtaacggtgaaagctgttacgtagtagtgcgctgaggtccaggtagttgaagtcaagtgcggcgtcaagaaagtccgggtctttgagataagagtgacggttcagttgatctttcttaactagcaccaggagctcgtgtttttcagtttgtcgtagtataaagttgtcgcgttgatagggcgctttaaagagtacgcgtggaagatggccgaagataagcagcatgggtgtgtcgtcgtctatggacaccgtaactacgaagaagtcctcggtcagtgttattttaacgtaacgtagttcgtcgatgaggtaaaagccttggtgcaaacaaggtgtgacggtgctgaatagtagatcgtgtccatcaaagaggatacaggtctggttaaagtgtggtcggtgtagtcctgaggtggtatgtgattctgtccagccgtgtggagtggtttgcggtggcatccaaacgtgaggtattgacaggtcaatgggtggtggcacagtggtgggctgttcacctaggctgtcctgtgcctttagctgctgcgaaaaagatcggtagctggccaggtctttggataccagcgcgtaagtgttaagtctctgttggtatctttccagggtttcggtcagatctacctggttcagaaactgctccgccagaggacccgcaaaaagacatcgaggcatatggaatacatagtattgattatagctttggaaaaagttgaaactgatggcgttttccctgacgaccgtgctgttacggaggctgctattgtaggtacactgggtggtgttttcacgcaggaagcggatgggtctcccgtaggtgttgagcagtaggtgaaacgctttgtccagcggttcggatatggcttctgcgccatatcgtgacgaaagtaggtggctgaggagacagacggcgaggacgatgaggtaggaggggaggcctggccgcatagcgcggccgcgccgctgggttcagcggcgtgatccaggtggtggttggcgttacacccgagagaaggagagaaaggatcccaggaaggagcacccgggtgcggcgctacgggttacaaaagtcgcgtctccgtctatttaatacgatgtcattggccgctgcgaagggagaagaggggacacgcgagtaagtcatgccgtccgggtgtggggacgacgctgattcgaaggggaacgctctgcggagattgcctcacgtgcgtaagcggatcggtaagcgcaagcacctggacatctaccgtcgcctgctgcgggtctttccctcatttgtggcgctcaaccgcctgttgggaggccttttcccacccgagttgcaaaagtaccgtcgccgtcttttcatcgaagtacgattaagtcggcggattcccgactgcgtgttggtgtttttaccgccggactctgggtcgcgcggcatcgtgtattgctacgtgattgagttcaaaactacgtactcagacgccgacgatcagtccgtgcggtggcacgccacccacagcctgcagtacgccgagggcctgcgccagctcaagggcgccttggtggactttgattttctgcgtctgccgcgcggtggcggtcaagtctggagcgtagtgcccagtctggttttttttcagcaaaaggccgatcgcccatctttttaccgggcttttcgttcgggccgtttcgacctgtgtaccgattctgttctggactatctgggacggcgtcaggatgagtctgttgcacaccttttggcggctacccgtcgccgtcttcttcgagccgcacgaggaaaacgtgctgcgctgccccgagcgcgtgcttcggcggttgttggaggacgcggcggtggcaatgcgcggcgggggctggcgcgaggacgtgctcatggaccgggtgcgcaaacggtatctgcgtcaggagctgagggatctgggtcacagggtgcagacttactgcgaggatctcgaagggcgcgtgtccgaggcggaggcgctgttgaaccagcagtgcgagctcgacgaaggaccgtcgccgcggacgctgctacaaccaccgtgtcgtccgcgttcgtcgtccccagggaccggcgtggcaggagcttccgccgtcccacacggtctttatagtcggcacgatgccatcacgggacccgccaccccgtctgacgcggcgaccgcgtcagcggccgccggtgcttcttctacctggctggcgcagtgcgccgagcggccgttgcccgggaacgtacctagctactttggaatcacgcagaacgatccctttatccgctttcacaccgattttcgcggcgaggtggtcaacaccatgttcgagaacgcctctacttggactttctcctttggtatctggtactatcggctcaagcgggggttgtacacgcaaccacggtggaaacgagtgtaccatctggcgcagatggacaacttttccatttcgcaggagctgctgctcggcgtggtcaacgctttggaaaacgtgacggtgtatccgacgtacgactgcgtactctccgatttggaagccgccgcctgtctgctggccgcctacggacacgcgctttgggagggccgcgatccgccggactccgtggcgacggtgttgggtgagctccctcagctgttgccgcgtctggccgacgacgtaagtcgtgagattgccgcttgggaaggccctgtcgccgcgggtaacaactattacgcgtatcgcgactcgcccgatctacgttactacatgcccctaagtggtgggcgccactatcacccgggcacttttgatcgtcacgtgctggtgcggcttttccacaaacgcggcgttattcagcatttgccgggctacgggacgataacggaggagctggtgcaagagcgtctgtcgggccaggtgcgcgacgacgtgctttccctctggagtcgacgtctgctggtcggcaagctgggtcgcgacgtgcccgtctttgtgcacgaacagcaatatctgcgttcaggcctgacctgcctggctggcctgctgttgttgtggaaggtgaccaacgcggatagcgtcttcgctccgcgcacgggcaaatttacgttggccgacctgctgggttcggatgccgtagccggcggcgggttgcctggggggcgcgcgggcggcgaagaggagggctacggggggcggcacgggcgggtacgtaactttgagtttctcgtgcagtactacatcgggccatggtacgcgcgcgaccccgcggtcacgctgtcgcagctctttcccggcctggctctgttggccgtgaccgagagcgtgcgcagcggttgggatccctcacgtcgcgaggacagcgccggaggtggcgacggcggcggcgccgtgctcatgcagctcagcaagagcaaccccgtggccgactacatgttcgcgcagagctccaaacagtacggcgatttacgtcgcttggaagtacacgacgccctgctctttcactacgaacacgggctagggcggctgttgtcagtgaccctgccgcgtcatcgtgtgtccactttgggctcgtccctctttaacgtcaacgatatttacgaactgttgtactttttagtgttgggttttcttccgagcgtggcggtgttgtaatttccaccacgtgtcgcttgctgcataaagggcgagcgtccccggagagggtatattcgttcggcgagagcgggcggcggtggtgggtatgtcctcttctgcggagaagactacctcagttaccgattccatcatgctcgctatcgtgaatttcaaatacatgggcccgttcgaaggctactctatgtcggccgatcgcgccgcttcggacctgctcatcggcatgtttggctccgttagcctggtcaacctgctgaccatcatcggttgcctctgggtgttgcgtgttacgcggccgcccgtgtccgtaatgatttttacttggaatctagtacttagtcagtttttttccatcgtggccaccatgttgtccaagggtatcatgctgcgtggcgctctaaatctcagcttctgtcgcttagtactctttgtcgacgacgtgggcctatattcgacggcgttgtttttcctctttctgatactggatcgtctgtcggccatctcttatggtcgtgatctctggcatcatgagacgcgcgaaaacgccggcgtggcgctctacgcggtcgcctttgcctgggttctttccatcgtagccgctgtgcccaccgccgctacgggttcactggactaccgttggctaggctgtcaaatccctatacagtatgctgcggtggacctcaccatcaagatgtggtttttgctgggggcgcccatgatcgccgtactggctaacgtggtagagttggcctacagcgatcggcgcgaccacgtctggtcctacgtgggtcgtgtctgcaccttctacgtgacgtgtctcatgctttttgtgccctactactgcttcagagtcctacgcggtgtactgcagcccgctagcgcggccggcaccggtttcggcattatggattacgtggaattggctacgcgtacccttctcaccatgcgtcttggcattctgccgctctttatcattgcgttcttctcccgcgagcccaccaaggatctggatgactcctttgattatctggtcgagagatgtcagcaaagctgccacggtcatttcgtacgtcggttggtgcaggcgttgaagcgggctatgtatagcgtggagctggccgtgtgttacttttctacgtccgtccgagacgtcgccgaggcggtgaaaaagtcctccagccgttgttacgctgacgcgacgtcggcggccgttgtggtaacgacgaccacgtcggagaaagccacgttggtagagcacgcggaaggcatggcttccgaaatgtgtcctgggactacgatcgacgtttcggccgagagttcctccgtcctctgcaccgacggcgaaaacaccgtcgcgacggacgcgacggtaacggcattatgagcggcggcgttgtacggcagcggggagaaaagtggcagataaattacgtcaggttcacacgtcgttagccagcgtcggcatatgaagggcgcgggcggccagtacggcctctgggttgagacaggacgaggcagggtgagaaagaggaggatgggggggaccggggtggtggtgctgctgctgttgtgggtgcggacggtgcgggtgccgggacagcgtgccggcgaacgttctgtaatcttccataataaaggtaaaaatgcccgtttcgtgtcgactccgctggatctcgaaggcgtcgggggtaatgcgcatcttgccggtgccgatgagataaaagtaccacattttttgacagatgatgcgaatcaagggttcgtacgcttcggcaccccagtggcgtgtgaagaaggccgccagacgaaacaggcggtgtccgtagagcgtgcctagggagaagaggatgttgccgttgcgcgccaggtcttcggggaaaacgaccggcaggccggtgtggcgctgcacaaagcgcgtcagcagtccgccgctcaagcgcgggtgacacaggcgctggctgagacgggcggcgcgtgtttcatcgaacacggccgcctcaaagtccagccccgggaaggcctggcgcagttcgcggtacagatgaggccagtagggttgcggcgtcttgcggctaagcacggcgtggtccgagacacccaggttgttcatagtttcgcgcagtagcagcgtttcgagaccgcggtgaaagaggaggacgcagatgaggcgtacgattttgagttcttccaaacgcagcgagctcagcggctgtccgcgcgacatcttctcgctaatctgtaatattagatgattggcgcaagtaaaggagaatttgcctgtgcggacccgcgggacggcggggttctcttcgtcgcgggccatcatcgttcgctcggtgagcgggtagcgacggtgacgacaatgacgatggacgagcagcagccgcaggctgtgacgccggtctacgtgggcggctttctcgcccgttacgaccagtctccggacgaggccgaattgctgttgccgcgggacgtagtggagcactggttgcacgcgcagggccagggacagccttcgttgtcggtcgcgctcccgctcaacatcaaccacgacgacacggccgttgtaggacacgttgcggcgatgcagagcgttcgcgacggtcttttttgtctaggttgcgtcacttcgcccaggtttctggagattgtgcgccgcgcttcggaaaagtccgagctggtttcgcgcgggcccgtcagtccgctgcagccggacaaggtggtggagtttctcagcggcagctacgccggcctctcgctctccagccggcgctgcgacgacgtggaggccgcgacgtcgctttcgggctcggaaaccacgccgttcaaacacgtggctttgtgcagcgtgggtcggcgtcgcggtacgttggctgtgtacggacgcgatcccgagtgggttacccagcggtttccagacctcacggcggccgaccgcgacgggctacgtgcacagtggcagcgctgcggcagcactgctgtcgacgcgtcgggcgatccctttcgctcagacagctacggcctgttgggcaacagcgtggacgcgctctacatccgtgagcgactgcccaagctgcgctacgacaagcaactagtcggcgtgacggagcgcgagtcgtacgtcaaggcgagcgtttcgcctgaggcggcgtgcgatattaaagcggcgtccgccgagcgttcgggcgacagccgcagtcaggccgccacgccggcggctggggcgcgtgttccctcttcatccccgtcgcctccagtcgaaccgccatctcctgtccagccgcctgcgcttccagcgtcgccgtccgttctccccgcggaatcatcgccgtcgctttctccttcggagccggcagaggcggcgtccatgtcgcaccctctgagtgctgcggttaccgccgctacggctcctccaggtgctaccgtggcaggtgcgtcgccggctgtgccgtctttagcgtggcctcacgacggagtttatttacccaaagacgcttttttctcgctacttggggccagtcgctcggcagcgcccgtcatgtatcccggcgccgtagcggcccctccttctgcttcgccagcaccgctgcctttgccgtcttatcccgcgtcctacggcgcccccgtcgtgggttacgaccagttggcggcacgtcactttgcggactacgtggatccccattatcccgggtggggtcggcgttacgagcccgcgccgtctttgcatccgtcttatcccgtgccgccgccaccatcaccggcctattaccgtcggcgcgactctccgggcggtatggatgaaccaccgtccggatgggagcgttacgacggtagtcaccgtggtcagtcgcagaagcagcaccgtcacgggggcagcggcggacacaacaaacgccgtaaggaagccgcggcggcgtcgtcgtcctcggacgaagacttgagtttccccggcgaggccgagcacggccgggcgcgaaagcgtctaaaaagtcacgtcaatagcgacggtggaagtggcgggcacgcgggttccaatcagcagcagcaacaacgttacgatgaactgcgggatgccattcacgagctgaaacgcgatctgtttgccgcgcggcagagttctacgttactttcggcggctctccccgctgcggcctcttcctccccgactactactaccgtgtgtactcccaccggcgatctgacgagcggcggaggagaaacaccgacggcacttctatcaggaggtgccaaggtagctgagcgcgctcaggccggtgtggtgaacgccagttgccgcctcgctaccgcgtcgggttctgaggcggcaacggcagggccttcgacggcgggttcttcttcctgcccggctagtgtcgtgttagccgccgctgctgcccaagccgccgcagcttcccagagcccgcccaaagacatggtggatctgaatcggcggatttttgtggctgcgctcaataagctcgagtaagagagacgctatatttagggcttccctctcttttttttctacaccgtgataccctaataaagcacaccgcggttattatcaacgtctctgtttttattatttagaaataaatacagggaatgggaaaaacacgcggggggaaaacaaagaagtctctctctagatgcggggtcgactgcgtggggtgctggaagtggaagcggtgctgatgggcgagggtcgtggcgcgggcacggaccgcaacgtgctgctgatgtctgctgcggtacgcacgtcgccgtccatgtcgctgcgcagataagaggtaggtcgtagtgcggcgtgctgcacgctcaccgttaatggtaccaggtcgtccaagctcgcaaagacgtgccacgaggggatgacgagcgtgagagccccgttgttaccgcttcggcgtctttgtccggtcaggatcagtgcccgggacagtccggcttgggtgtccgagtcctcgtcgccgctggcctcctcgaagccggcaaacatggcctcggacaggggggtcggtgtcggtgtggaggagaggtcatcttcgtcgtcctcttcctcttcttcctcctcttcctcggtgggtggtaatcctggcgattgcgggagaaactcggagacggcgccgcgcatgacgttgctccgtggaaagagaccggcgcgcagctgcacctggggacgcttgatcttgtccggtttaccgggtgtgagagtccaaaacccacggcggaaaaagtggatgcggcctagcggctgtcggtgttccaaatgaacggcctgatcgccggtcagcgtgacgcggagggtgattcgcacacgatcgggtagcgggccggcttctatggagacgcccgggatgttttccgggaaaaaaatggtgtcgtgagtctgattggtctcgaaagcattctggatctgcacgatgtactcgggatgtatgcgcgttagcgtaaaacttttgggaatcaacagctggaagccgttgtccggcaagcgtcgtaggtgcgggtacggattgtgtcgcgccaccacctcggcgcgatgcgtgtaaaccgaaaagtgcagaaacacgctggtcggcgggtgcggtgagtcgtgatgcagaaacagcatgatccattggcctcgctcgtccgtctccgttttgtggatgtacgtgttagggtccgaacaggccagctgctccagggcgtctaccagcgtcagcgggatagcgccggcgcgaaaggcgaactggctgacaaagatctggccggcctccaagctgctgtcggttctgcggcgccagttcggcgttacggtcagtcgcacggcccagtagtgagccgtgcggcggatgatggcgcgcgcctccactcgcggccgattttcttcgccgccgcgccgctggctctgaaagaggtgcagtccgctaacgggcacgcggtccagcggcagtgcaaaggccagtaccgagaccgtgttgttttctgagcctggcgtcaggcgtcgtgggccaaagttgttgaggtccaccagcagtcggtcctgttcgcccaccacgcagcggcccttgatgtttaggtcggtcaggtctacggtgtcgtgcggagatttgttctcctgaaaacagcagagaaccgagggccggctcacctctatgttggtacgcaggtccaggagtcgcagacgaccggcttccagcgagccgccttccacgttggtgatgagccgaagcacctggcagtgcaggcgaccaaagcttccgctggcggcttcggcctcgctgatcgcggccgcttccgacgagggtccctcaccgggcgaggacgatgcctgagacatcgcgaaggcgggatgagggggggggtcaggggatgcgcaaaggtgaacgggtcttcgtgggaggtcgggaagggttccggcaactgtcgcaaatatagcagcggcgacaggtgtggcggccaaaagtcgcgtgtctgagtggacgtgggtttttatagagtcgtcctaagcgcgtgcgcggcgggtggctcaacctcggtgctttttgggcgtcgaggcgatgcatggcccgggcaaggcgtcttgccggtggcggcgacgtttgggttgcgcagcgggctgccatacgccttccaattcggcgaagatgcggtagatgtcgttggcgtcccagaagaactcctggtacttcagattctgaccctgaaccgtagccaccatgggcaccaggttgcgggccaggatgccggcctgccagggcggccaggtgaacacggccggattgtggatttcgttgtcggaatcctcgtcggtgtcctcttcgggcgcgacggtggactcggccttaaggcggccgcgtgtcataacgcccgccgtgcacgccgtcgccgaggatgctgatttgcgtttgcggcccgcggaagtggaggcgcccgccatggcgccgccgccggtaacgcggggcgtcttgcgctcggtggttacgagttcctcgtcggagtccgatccgctggtccagacgtcgtcgtcgccctgggcggcaccctcgtcgtgccggtcccaggtgtgtcggtactcaagcttgccctggatgcgatactggctggtgaaggtggggtgttcgctgtactgaggcccgcgctgcagcagcaagtcgatatcgaaaaagaagagcgcagccacgggatcgtactgacgcagttccacggtctcgcgtatcgcttgcacctccaggaagatctgctgcccgttcatcaataggttacctgagatgctcaggcccgggatgctcttgggacacagcagcccaaaatgctcgtgtgaggtaaaagccacatccagcatgatgtgcgagatcttgcccggtttgattatcatatttttgggacacaacaccgtaaagccgttgcgctcgtgggggcgcatgaagggttgcgggttgcgggtcatcgtcaggtcctcttccacgtcagagcccagcgtgacgtgcataaagagcttgccggagggcacgtcctcgcagaaggactccaggtacaccttgacgtactggtcacctatcacctgcatcttggttgcgcgcgtgttctccatggagcaaaccagctcgtgcgcgcacaccacgtgccgcagtgccacgtccttggtgggaaacacgaacgctgacgtgtagtagacgtcgggctctttccactggttctgctgacgcgtccaggccagtcccgagaccgtgagacgcgcctgccacatctgcttgcccgacgcgtgaatcacagcgtcagctacgggcaggtgtcggtgtttgcgctcggccgccgacgggtagtggtgcacgttgatgctggggatgttcagcatcttgagcggcagcgcgtacacatagatcgacatgggctcttggctggggcagatgctccggcccgtggggttgtgcacgttgaccgacacgttctccacctcgctgcccgtaaagtacgtgtgctgcacctgcagctgattgtcgccgcggtggcatggcgtcgagtcgggcgtgtactgcgacaccaggatcagcgagggctggctcacgcgcacgtggatacccgtctgcaggagtcgcgtctcgtgcggcagcaccggcgtgtcgccgcgactaaacacggctttcagcacgtgccccgaaatgggacccagtacggatatcatttcgggacaacggcgaccgcgcgactccatgctgcctgcgcgtacgggtgtaggcgactgagcggcgcgccctctgcggccgccgccttacataggcaggcgaccagacgcggaacccgaaataaaaacgttctacacagagacaaccgcggattattgagtgtctttttttattaaaaaaaagaggcaaagccccaccgtcaccacaccccatcacacaccaccaccgatttttttgttttaaccccgtatcgcgcggacgcctagtgtccgtttcccatcaccagggttctctgtttagagatcgccgcagaccatggctaaagtgacaggactcgttttctctgtcgtattttccgtaagcttacagtcttgcggttccgtctccggggacgccagccgcatgggcagcaggtcctccaacgcgatggaagcgcccagcaccgagagctgctgttgcgacggcgaatgggacgtggaccgcgagtgtagcgtggatttgacttggtgcgtcattgctgacaggcaaccgcgattcagcgtatgctttgacgagataaaatagaggcgtcccaggagcgcgtcccgtgggaacgtggcgccattctcgtcgctcaccagtacggttaattccaaccaggagcgcggtagccagaccgtaacgggcattttgagtccctgacggttgtgtggtacaaaaacacccagataaggcccgtaaaagcggcggtagatacgtaacgtgtgcgagttcttcagcgtcaattcgtaagggacgcgcacctccagtccctcgtccgccgcgccagagcgtggcggtacaaagtaaggcagtggcgcgtccgaaaagaagggtcgtcgcaccgtttcgcgtcgcagccgcaggcgaaacgccactgggtcggctggcgcctcggtgcggtcgcaggtcacgttgaaacgtaacatgccgtcttggtatagcgtgagtgacgacagcgtcaggtccggcggtgattcgttcgggtctagctccaatcgtccaaagacggagggtcccaatgtcttggccgtggtttccgagaggcgcgccgagatacggctggtgagtccacgcggccccgagatgccgccttccactcgatgccagcacagcgcgtgtcgtacgcgcaccgtcagcgtgggcgtcagatccgcgtccgttgactccgcggcatcggcgacggaagccgcgttctccgttacgttgtttatatccagcgtcgactcgaacgtgagttctggcagatgcagcgccagacagtcgtgtaacgccgtgtgatgcgcggctttacgtcgtagcggtagccgtttcagcagcggcgtgatgatacggagcgcgaagagattgagtgataagcgcacgatggccatgcgcgtcagttgttggtcgattaccgagcgcaggatatggcagcctgggcgtgcgggaaagagagagaaggccgggcgcacgtcagaatcctcgttggagaccacgcatagaatgccgcgttcacgatcgtcgttgcggtcatcctcgtcctcttcttctttcttctcttctttttccttttttttctcgagctcgtgggaagccgccgtttcttcttcttgcgacgtcgcgggggcggtttgagactcgccgttcgcttcccccaattgcagcggcgtagagagcagaatctggaagggatcccgcaattcttcgggtcggaggtcgaggtgcaactggattagatggtaagttccgcggtgcacccgaggctgacggatgtcgtgtttatccgtcaatgtaaggatggtctgcggcgagccgctgtgcttgtccagctcgtccggcgttttcaggaggaggctgtcgtcgtcggtactggcgacgcccatcatggtcgtggtggtagtggtggcgaggaaagtgagcggcggcgccgacagagctcggcgttggcggcggcatttgccgctgtgtcggctgctattgctgccaacgccaccgccgccgcctcgtctggctcgtggccggcgggcccgattccgaaggttggggtcggcgcgtggcatgcttggtgtctgcgggcgcgagagggccggctcagcctttaaatatgcaggtcgcggatttgttatcgggtgaaacgtcacacaccgtgaagacgacctgttcgcggatgaggtcatccagctgtcgcagcatgacgaaaagcgccgacagccgcgcgatctcgtcgtcgggcgacacgtgctgcggccgcgcgggcgtgcgcggctcgccgacgctgcgctcgcggtccagccgcatcagcagctcctggcacttgacgagcagcatggagctgtcctctagcgccaacttgcgcacgtaggtcatggtcagctctgaggctagattggccaccatggacatggagaggcaggcggtcttcatgtcgatcagcaggtgctggtcgatgaccggatcggggatggtgaaggtggcgtcgcgaaaagtaatggtctgcagctgctgcacggcagcctttacctcctcgtacgaacggtcgagcgagaagaggcccatgatgagtagtcgctggttgatttccagcgccagtggcatgggcacgatccagggcagcaccagctcccactggcccagcgtcagcaggttctcgcgcgccagcggtccgtggaagagcggcggcagcacgcatagcgcgtcgcccttctcccaagtcacgggtcccgtgttgaggacggtgtagagcagtccgtgcgtcggtacgtgtaggaggatctggttgccttctacgcgccgcatcaacgtcagcgtcatattgcgcagcaggccgcgcagtcgcacgtagccgcgggtgtgatctacgaactggtgtaggcccagctggtagtgcttgatgagatgtagacgctgcggaatgggcacgactgccgctactagcttggtcagtttgcctacgtcggcgatgctgagcttgtggtcgaaagtgcagaagatgttggcctccatggccgccatagcggcggtgaaatcgtggccgcgacggaggagaagcggagacgaacaacgtctgcaccgggcgcggcgtcagagcgagcgtggcgcgtccgggcccgcgtttgcgtctaggtgactcgccgctaacctgcggtcgtcgccgtcctcctcaccggacggcctcacgagttaaataacatggattgctgcagcgggatgatttcgcctacgacgtagttaccaaagtgcgtctcggacgtggcgaaagccccggcgccacccttgagtttggtctccatcagcgccagcgtggtggtgctgagaatcggcaacgcttcctgcgtcaggcggcacgggttttcgatgagttgttccgtgccttcgacgcagacgtactgcgtgtccgtgtcgccgcggatgcagtccttggcgcgtagtaggtactcgtcgatggttttgaagagcgttttgttggccgcgataatctcttctgtgttaaagtactgcgcacaggggctgtagaatttggagttgtagcccaaacgttcgcgatgtcgggtgttgtacagtacgtcgcttagacagccggcttgcgaggcccaggggttgtgtgtggccgcgaaagtctgtgcgtcagcttcgcgatgatcgtagatggccttggtggcggcctccgtgtcgtacggatcgacgcccagcatgcaggaggcgcgtccgcgcgggttgttggtgattttgaagtaattaacgtccatcgttaccggcgtgaggatgagttcgcacacggccttttgtccgtgcaccgtggcggcggcgttgcgctcggacatgctgccgaacgtcagcatggagatggtctccgtatctaacagttgcggccgttccacgccggccgcgtgccggatccagcggtccacctcgtcgtggcggtacacgttcatagggaagacgcgaaagaggtcttgcacgcggacgcccatgtcggtccgcacgcggtttacgtaggctacgcaggtatttgacgtgtaacccagacccatgtctacggtgttaatgttctgcgtgacgtggtacgtggtgctgatgtcgcgttcctccttggtcacgatgggattgttgatgataactgacgtgcatgatttgccgctgtagagcagcatgtccacctcgaaggtgtcggtgcgtacggccgtgagtgcgaatcccgggtggatgtgcgccttggtctgcagcaccagtgaaactggtgagattttgtataacatggcggccagcgtcataactgagtgcaacacgttgggacaggtggccgagtagcgcgaaaagggcgagcgtagccagttgtggtactcgtgtgcgaaggctgtgggtagcggaaaaccaccgtcgtgacggtgatagtgcgggaactcggtcacgtagcgtttaatgtcgtcgctcaacgccgcgcagatggtggggtttgagtagaaacggtggaaaggtacgggtaggctgtactcgatcagcgtcttaggcgccgtcacgacgcagcagccgttgtaaagcacgtgctgacgtgagataaagtccggcaggccctgacgttgcgcgtgatccagaggcgcgcgcacttcgagcaccttgacgtgctcgcccacgaattgcacggccaaaaacagctcacgacaggcctgcagcagcggcgtatgcgcgtcggtggcgacgtcctccaccagctcggtcagcatctcgcctacggcttgacgttgcgccgctaccgagtcttcgggggtgacgccgcttgtgctctctttcgacgtcgtacctgacgtggagaccgcggtggcggccggcatcaggagaaacgccggtcggtaaaagaggtctactagcagcgtcttgaggttgagtcccaggccgcaggcccggttgttggtcatggcgggtatgaggcagagataaaagaccttttgtaacgtccattcgtcgtcggtggcacggtaatcgtccacaaacagcggctcgtcggcatccatggcgcccaaacgcggtacgtcagaaacgccgtggtgtcgcgcctcgatgttggccgggttcaacggttgccggtcggccactacctgtacgccttccatattacgcggcaggtgcgtaacgaaggggggccacagccggtggtcgtgcagcgcgttcacgtaagccgatagcggttcctcggccagttgaccgttgttaagccccggcagcgctgagatgcgcgttaccagacgcagcacggcgactagattgcggtagtgaaagagcaactgcggtggtagggcgccatcggccaggtgttcggcgatcaacgtcaccagcgcgtagctgtgtgcaaaaaccagcagctgacgtgtgtgaaacatgttgacgatacaacgtgctatgaaagcgcggattagcaaaaaagcgtcggcgttgccgtgtaccagtacgtcgaccaggtagcagagctcggggtaattggggctggtcacggtggttttgaaaagtcgcaacgtctcttcgtagtcgggtggtggccgcagtcgcatgtgttccatgatctcccaggtgcgcagttcgtggaaggggcccggtgccagtccatctggcaaattaccgatgacgatacgcggcgtacacagcgccaccgtttcgctgttttcctggcagtgcgtaaagtcgaagaaggggtgcagctcggtgtagagcgtgatgttgcccaccttgtagaagtcggtgaccacaaaatcctgcttcatttcgttcaccgtgcgcgggacctcacgccgtacgcggtaaaaatgtggtatgcggcgcgccgcaccgcccatgggctcctgctgaaaacgacattcgagcagccgttgcatggcgggttccgagggcggtccgcgttccgtgaaggcctgcagacagggcgcgggttcatgcagcaccgggtggcacagcgtcttaagcgcgtccacaaagtctatcttttgcacggcacggtcccggtttagcaggtaggccgtggtgggcagcgcgttgcggacggtgtcgttgagcttaactttgctttccaccgtggtgtaaccgcgatcctcgggcagatacagccctacggggaagaaaaacgtcaggtccacgttacgttctagcggatctttggtatcggtgtttttgtagacgcgccgcaagttttccataatcaccgttttttcgcccagtcgaatcacatccatgcttagtggcgttaggctgtgcgccccggcctgcgaaagcgagtcgttgggcagatgcggttgacccgaagtcagatgggccttgtatgagttgaaatcggccaggatcgagtgataggaaatggcggtgacggcgttttcgggactgagcacaaagttgccgtaggtggccggcgccgagaccgtctctttggtgatgtggcttgagagcagcgacatgatgatctgcataacgttggccgtgcttaccatcacgccgctgatcttggcccccgagctcgtggtatacgtggtggggttgtctaggatgctatcggtggccgcttcggccagacgcgtgaggaacttgagcacatagtcgcgatcgcgcgtgcgattcagcaaaaagagcgtggccagcattttggccttgaagctctgcaagatgttgcttcgctggatgcggttcaatgcctgtcgcgccagcgtggcgttttctaccagcgtctgcaccacaaagtacggcggcgccttgcgtagcagtgtctgtaaaaagctgtgaatcaagccgcgctccatggcgtcggccgtgtttttaagcgcgcgcagcaccgtgtgcatggcttccacgttgaggatcttgtccaagatggtgccctcgaatgtctcgcgcagatacgtgaggcaggctgcgctgagctcgaaggggatggtgatgggggatttttcactgtatttggtgaccataatggtggtctgacgactggtgggcaaaccggcgccgctggccacacgcggcacctgcacgtggaacagcattttgcccgtagtcagtttattgaggtcgtggaacttgatggcgtgcgccgccgcggccaagccgctggtcaaaaaataaacccattccaggcgattgcagaaggtgccgaagatggcttcgaagtgaatattgtaacgctcggggtcgtcgccgtagtagatgcgtaaggcctcgaacatctcctcgccggcgctggtcttgacgtgcgtcagaaagtcagtgggaatgcctactttaggcaggagctcgagcgccgaccagttctccatcgcggcggcggcgtgagcgcgaggcgtcggagctcggggaaagcagcgcgacccggagaatggccggcgctgcgccgcgccgcctcggctgcgacgctctaatagtcgtcggcggctccgctacgccgcgccgggttttacacgtccccgtgcacgttcgcgcctgcaacctcacccaagagctatcgacgggcgaggacgcccgcttctgtcgtccgcgacccgttaacgtcgaacgggtacgcgctgttttcgcggctctctaccgtgcctgtcccgtacacgcgaggaccgagtccgagcgtgtcaagctggtactgggtcgtctgttgctgggacccgtggccgtaccctgtttttgcgacggtgaagtggagggccacggcgagcatctggtacccacgacgcagttttgtcgcgggccgctgctctacgtgcaccgacgttgttgttgcggatccgtgaccgccgggcgcgcgctgtcctaccacgttctcgaaaaccacgtggccacgcatgtgttacgcggattgctctcgctgacggaatggaatcgagagttgccgggccttttttgcgactgtcctggcagcggtggcgccttgggaaccgaggaacgctacgccatggcctgcttgccgcgcgacctcagcctgcacctggacgactatccttacctgatggtggaaatcggacgcgtactcagcgtcagcgaggtagacgactacgtaaccgccgtctccggctacctgggcgaggccgcggcgccgcgcattcaggttcactacaagctgctctttggactcaacgtgcgtccgcaagcgccgtgcgcgttggacgctacacgcgacttttttctgctggagctgcaaaagctttggctgggcgttgaatatcaccacgaagtcacgtcggagtttttcggtcgcgtactggctcagctgcatcgcgaccgcgcccgcgtcatgatggcacttcgcttgcccgagcagacggtgtgccacctaagcaccttcgttctcagtcgcttcaagcgacaggtactgtacttcaagttacaggtgagctacggcaagtgccggactggccacgctgacagaagtgggggagggggaaacggtggaagtcagggacaccacaacctactgtgttatcgacgtcttagcgtcacgtttgccgacacggacacggtgtggagaaaccttttctacgtttattatgaactagctcgggatctggggtcccatgggacagaggaccgatccgtaagccgcggttacggtgtttcttgcgctccgaggacgtcgcggctaccaccgtcagaaccgacggtggtttcagccaacggacacgcgctgtcttccaccgcgctcccgacgacgagcgcgggtcacaagctgtcgctgccgcgcgacccggccgcagatcgcgttcgacgttacgtgtgcattatctcgcgtctcatgttcgcccggtatggggagagatggcgtaaacaccgtcgacggcggtcggagacgggagaagaggaggaggaagagacggtggaatcgggggagactgacgccacgccgccatttgactttacggggcagcagctgcgccgggcctatcaggaacaccgacgtcgtaaacatctagccgtgcagcgttacgcgccgtgccgtcgtaagctcatcggcgggatggagtttgccgaggtgacgggcgttagtctggaccgcatcgccgtcaacgctttcaacaccaaccgcgttatcaatatgaaggccgcactctcgtccatcgccgcgtcgggtctcggcgtgcgcgcgccgcggcttcccaagaacatgacccacagttttgtgatgtacaagcacaccttcaaggagcccgcttgcaccgtcagcacttttgtttccaacgacgccgtctacatcaactcgctcaacgtcaatattcgcggttcctatcccgagtttctgtactcgctgggcgtgtaccggctgcacgttaatatcgatcacttctttctgccggccgtggtgtgcaacagcaactcctcgctggacgtgcatgggctggaggaccaggcggtgatccgctcggagcgcagcaaggtgtactggaccaccaactttccgtgcatgatctcgcatactaacaacgtcaacgtgggttggttcaaagcggctacggccattgtgccgcgcgtctcgggcgctgacctggaagccattctgctcaaagaactctcgtgcatcaagaacatgcgcgacgtgtgcatcgattacggtctgcatcgcgttttcacgcaactagagctgcgcaattcgtaccagatccccttcctggccaagcagttggtgctgtttctgcgtgcttgcctgctcaagctgcacggtcgagagaagcggctgcagttggaccgcctagtatttgaggcggcacagcggggtctctttgactacagcaagaacctcacggcgcacaccaagatcaagcacacttgcgcgctcatcggcagtcgtctagccaacaacgtgcccaagatcctggcccggaacaaaaaagtcaaattggatcacctgggccggaacgccaacgtgctgacggtgtgtcggcacgtggaagcccacaagatccctcgcacgcgcctcaaagtgttagtcgaggtgctgggcgcgttgcagagtatcagcggtacgccgcacacgcgtgaagtgatccaccagacgttgtttcgattgtgctcggcggccgcagccacctcgggcctgtgttcatcccctcccccattgtgtgtgtcctcatcttcctccgccccttctgtcccaacctccgtcagcgttgacggcagttctgaacccacgtcgccgcgagcgcggtttgcatcacgatgatggaagccgcggccgctgccgccgcggcgtttcgtccggaggagcgtccgacgccgggttggcacgacgcagcgttgttaatggacgacggtacggtgcgcgagcacgcgtttcgcaacggaccgctgtcgcaactgattcgccgtgtgttaccgccgccgcccgacgccgaagatgacgtggtttttgcttcagaactgtgtttttattgcagcggtcgttttaaccgcaggtcgtccgtcttctccatctattggcagaagcatagcgatctggtatacgcgcttacgggcattacccattgcgctaagttggtggtggaatgcggtcagttggggagtggtaggctacggtggcgcgacggtgacgtgggtggtgaggagcgccggggagacgacgacagcagggacgagctgtacgacgtgccgggaatttacatgatccgcgtcaacgacggcggcagcaccggccccaggcacgttatttggccgggtaccagcgtgctttgggcgccggacgtggtgatcactacggtgcagcgacgaatctcggcggcgcgcgccctggtgaacacgttccgccagtatttttttttgctggaacggcgctcgcacgaggagctggttctttgtccgcccgagatggaggagcgtctagcgccgttgttgcagagtgccacgcgtggtgattcggacatgtttgacggtgtggtggccagcgcttatcaccgtttgcgaataagtaatattccgcgttcatccgcccgtctgctggagcactgcgtggggctggcaggtgctaagaagctgctcttgctcgacgtgccgcgtctggagaactattttctttgtcaagtctgtctttacgagctggacgaggacgagatgggcgaggagatgctgggtatgttggccggaaagcccgaggacgccgccgtctcgggcgcaagcggcggttttctgctacatcgcaagacgatgaagctggccgcctgtctatgtttgctgctcaattcgctgcatttgcaccaggaggcgctggaggccttggatcctccgccgccgcgcgtcgaggagaacgaccttgtcaacgtggtgctgcgccgttactatcgcagtcacggcggcgtgcaggcgcggacgttggcggcggcccgggctttgttagccgactacgccgaaacgttttcgcccttggggagttttacgcgcctgggttacgatcgtctcgtttctgccgatgccggcgtcagtcgccggcacctggtggctctgctgcgtgcctagctgaccctgaaacggatggcgtgtatctcgtcacacaggtaggtggccatgatgacggctatgataagatcgtccgagatacgattctggcgcttggccgagtagcgtgccgtcgtgccttcggccagcgtgacgcggtgcaggttctgaatctgctccagaagatactcgatggggtcgtggctcagcttgatggtgtaggagacgagctcttgcgaggctttgatgtagcccgagttgaaacgcgagatgaactgttctacggccagcgccttgtcgcggcccatgaggtagaagggctgttcgatgtggttctggtcgggcgtgtggtagaagagcacgcggatgagcgtgctactctgcacgctctgtcggatgaggcaggcgatgcgcacggccgccgcctggttagtgttgccctccacggcgatacgcagttcgtccaggtaagggtgcaggctcagcaccgagatgatcatgtgcgccgcgcactcggcgatggctacctcagaactctcggagaggtcgcgcaaaaagaaatgctctaggccgtaaatgagaaactggtgtcggtaggcgcctacggccgccacgcccgtgcccgaggccttgcggttggtggtgaaggccgggtccagatatacgtagagcgtcttgccgaaataatcgtaggcgttggtgttgagcgtgctgtaacgcaaaatatcgaactcttcgcggctctggtccgtgatgagcacggtgttttgcgagatcttattggtaccgccgatgatctcgtccatgaaggcgcccggcataaacatgttggccgtcttgcgcacctgcgagttgaggctgatgaaggtgggcttgtgcagtcggtagcaaggacaggccgtggcgtcgcccttctccgtgaagctgtgcaggtgctcttcgcacacgtaagagaccacgttgagcatgtcaaagggcgcattgttgaggcgcgtcaagaaacacgtggcgtcactggtagtgttggtggacgatatgaagatgatcttggtggtattctgtgccaggaaccccagaatggtgttgaaggcctctttcttgatgaagtgcgcctcgtccaccagcagcaagtggaagttttgtcctcggatgctctgtgtagagaggagacagaaaagggactcttatgattacgcacgctcggctggaagcctacagagtcggggtggggccggacaggtgagccaggtgagccgccaggtgaggcgggatcgccgtgtgccaaccgggctgcgacctgaaaaccggaaccaatccgccgacaccggcgccgcgtgacgcgcgcccataaaaacgaaagtgtcgtcgtcgcgacccgccacagccgccatgaactcgttgctggcggaactcaaccgactgggggtcgcgcacgccactacggaggatgtttttatctttgtcgaccgcctctttcaacacttttccttccttttccaggccgaggagtcaggcccgcgccgcttggaactggtcgcgtccgtgttcgagcacctgacggtggagtgcgtcaacgacatcctggacgcctgcagccacccggacgtgaacgtcgcggagacaagcaacacctgtcgtccctgcccttctcctgttccctccgcccccaaaactgtcagcgacgctcagacgtcatgtgcgacgtctcgggcgcctgtgacatgaggcacgtccagaacgcgtttaccgaggagatccagttacactcgctctacgcgtgcacgcgctgctttcgcacgcacctgtgtgatctgggcagcggctgcgcgctcgtctccacgctcgagggctccgtctgcgtcaagacgggcctggtatacgaggctctttatccggtggcgcgtagccacctgttggaacccatcgaggaggccgcactggacgacgtcaacatcatcagcgccgtgctcagcggcgtgtacagctacctcatgacgcacgccggccgttacgccgacgtgatccaagaggtggtcgagcgcgaccgcctcaaaaagcaggtggaggacagtatttacttcacctttaataaggttttccgttctatgcataacgtcaaccgtatttcggtgcccgtcatcagccaactttttattcagcttatcatcggtatctactcaaagcagaccaagtacgacgcgtgtgtcatcaaggttagtcgtaagaagcgcgaggacgcgcttctgaaacagatgcgttccgaatatggaaacgcacctgtattcggatctggcgtttgaggcgcggttcgctgacgatgagcaattgcctctacatctggtgctcgaccaggaggtgctgagtaacgaggaggccgagacgctgcgctacgtctactatcgtaatgtagacagcgctggccgatccgcgggccgcgctccgggtggagatgaggacgacgcaccggcctccgacgacgccgagaacgccgtgggcggcgatcgcgcttttgaccgcgagcggcggacttggcagcgtgcctgttttcgtgtactaccgcgcccactggagttgctcgattacctacgtcaaagcggtctcactgtgacgttagagaaagagcagcgcgtgcgcatgttctatgccgtcttcactacgttaggtctgcgctgccccgataatcggctctcaggcgcgcagacgctacacctgagactggtctggcccgacggcagctatcgtgactgggaatttttagcgcgtgacctgttacgagaagaaatggaagcgaacaagcgcgaccggcagcaccaattggccacggccacgaatcaccgtcggcggggcggactgcgtaacaatttagacaatgggtcggatcgccgattgcccgaaacggctatggcttctttggagacggccgtcagtactccatttttcgaaattccgaacggagcaggaacctcctccgcgaatggcggcggcagattcagtaacctggagcagcgggtagcgcgtttgttgcgcggcgacgaggaattcatctatcacgcgggtccattggagccgccttccaagatacgcggtcacgagttggtgcagctgcgcctggacgtaaatccagacctcatgtacgccaccgatccgcacgaccgagacgaggtcgcgcgtacggacgagtggaagggcgccggcgtctcgcgtctccgcgaggtttgggatgtgcagcatcgcgtgcgcctccgtgtgctgtggtacgtcaattccttttggcgcaatcgcgagctgagctacgatgatcacgaagtcgaactataccgggcgttggacgcttatcgggcgcgcattgccgtcgagtacgtgctgattcgcgccgtgcgcgacgagatctatgctgtactacgacgggacggcggcgcgttgccacagcgtttcgcctgccacgtgccacggaacatgtcctggcgcgttgtttgggaactttgccgtcatgccttggtgctctggatggatcgggcggacgtgcgtagctgtattattaaggcgctgacgcctcgtctgagccggggtgccgccgctgccgctcagcgagctcgtcgccagcgcgagcgcccggcgcccaaaccgcaggagctgcttttcgggccgcggaacgagagcggtccgcccgccgaacggacttggtacgctgacgtggtgcgctgcgttcgcgcgcaagtggatttgggcgtggaagtgcgcgcggcgcgttgtcctcgcaccgggctttggatcgttcgtgatcgccgcggacgcctgcgacgttggctctcgcagcccgaggtgtgcgtgctctacgtcacgccagacttggacttttactgggtgctgccgggcggctttgctgtgttctcgcgcgtcactcttcatggcttggcgcagcgggctttgcgagaccgattccagaactttgaagcagttcttgcaagaggaatgcatgtggaagctggtcggcaagagtcggaaacaccgcgagtatcgggccgtcgcttgccgttcgacgatctttagtccggaggacgacagctcgtgtatcttatgccagttgctgttgctctaccgcgacggcgaatggatcatctgtttttgctgcaacggccgttatcaaggccactatggcgtgaatcacgtacatcggcgtcgtcgacgcatctgtcatctacctaccttgtaccaactgagcttcggaggtcctttgggtccagccagcatcgatttcttgccgagctttagccaggtgaccagcagtatgacgtgcgatggtattacgcccgacgtgatttacgaggtctgcatgttggtgccccaggatgaagccaagcgtatcctggtcaagggtcacggtgccatggacctgacctgtcagaaggcagtgacgctaggcggcgccggcgcctggttgctgccgcgtcccgaaggctacacgcttttcttttacattctgtgttacgacctgtttacctcatgcggcaatcggtgcgatatcccttccatgacgcgcctcatggcggcggccacggcctgcgggcaggcgggttgcagcttttgcacggatcacgagggacacgtagatcccactggcaattacgtgggttgcacccccgatatgggccgttgtctttgttacgtgccctgtgggcccatgacgcagtcgctcatccacaacgaggaacccgcgacttttttctgtgagagcgatgacgccaagtacctatgcgccgtaggttctaagaccgcggcgcaggtcacactgggagacggcctggattatcacatcggtgttaaggattctgagggccgatggctgcccgtcaagaccgatgtgtgggacctggtcaaggtagaggaacctgtgtcacgtatgatagtgtgttcctgtccggtgcttaagaacctagtgcactaacggggtctgacagttcacggggagaagaaacaagaaacaacaaaaaaaggaggacatggactcgccacggtttgtggcaaggcgtatgttatcatcatggagctactcacgttggtgttgtagcaactggcaaaaagcgccgtgctcttggcgccgcggtggtcgatgctgatcacgttgtccttgttctcgaccacgtagtcgcgcgcgaaggtgtggcggcagcggaactcgacctctttgagcacaaactgcgacacgtgcttttggtgcgccacgtagccgatgctgatgccgatcatgtgcttaagcagaaacgagataatggggatgatgaaccaagtcttgccgtgacgtcgcggcaccaggaacacggtggctttctgcttaaagatgtcgatggaggtctgcgagaggaagtcgatctggaaggcgtggatgaggtactgcagcacgcgattggccagcacggggatcttggtcacggctataaaaaagatgacgtgtatcaataaattcttttgaaacggttcgagtcggatggcttttgcgtcgccctcgacggcggtactgaagccgccgtcgagccactttttaaagtcggtcatgaagttgttgatctgctgaaactgcggatcgcggtagagctcggtcaacgcgtccagcttctggtaggaggcgcgctgctcctcggagcacgggcgaaacgtcagttcatcgagcgcgctcttgaggcgctcgtgaaacagcagctcgcgctggctttcctcgggcgagttgtagtcgcggtggcggccgcagaaggccatgagcggcaggaaggcctcgttgcacgagtgggccagcccgagttcggggtgcatcatctggtagcgcttgcggcacagcgccgccacattggtgaaggccgtggagatgcaggaggtggggtggctcttgcgcttctgcagctccgcgtagcgctcctggatcttggcggccgagtctccgcgcaacatgatggcggcggcggtggtgcgagcggaggttaggcggcagcggcgagaggagaggaaaaagatggcggccgcgaggacgacggaggatccacccgaaaaccacgttgttgcggacgtggcttgtgggacgggcgccgtcactcgttcgtcttcgtcgtccctagtggtgtcgtcttcctcggcgtcaggctcggacgaaccttcctccgcctctcctctcagtttccccgtctgctccccctcaactgccgtcaggtctccggggtccgccggggtttcaacgtccctgtgctcggtggaacggatggtcgagctgtcggcgcagtctccggccgccgatttctcggtctccgaggcttggcgcttcgaggaggccgtaaatatggcgctggtggcctgcgaggccgtgtcaccttacgatcgctttcgcctaattgaaacgcccgacgagaatttcttgttggtcaccaacgtaattccgcgcgagtcggccgaggtgccggtgttggatagcagtagcagcggtggcgatagcgggccggaggacaaaaagaaaaacgtcgggaataaaaccgcgggggaaaagaacggcggtgggtctcgggccaaacgccgtcgtagacgacgcgctccgaaaaacgacgccgccacgccgtcttttctacgtcgacacgacgtgctggagcgtttcgcggccgcggctgagcctttgccgtcgctttgtgtgcgtgattatgcgttacgcaatgctgaccgtgttacctacgacggcgaattaatctacggcagttacctgttgtatcgcaaggctcacgtggagctgtcactctccagcaacaaggtgcaacacgtggaagccgtgctgcgacaggtgtacacgccgggcttgttagatcatcacaacgtgtgcgacgtggaggccctgctgtggctgctgtactgcggaccgcgtagcttttgcgcgcgtgacacctgtttcggtcgcgaaaaaaacggttgtcctttccccgcgttgttgcccaaactcttttacgaacccgtgcgggactatatgacctacatgaatctggctgagctgtacgtctttgtttggtatcgcggctacgaattccctgcgccgacgccgcaggcgacgacggcgggtagtggtggcggcggcggggccggcgcttgtgcggtcgagacgagcgcgtcagcaggccgggtcgatgacgccggcgacgaggtgcatttgcctttaaagcccgtctcgctggaccgtctcagagaggtgttgcaggcggtgcgcggccgcttctcggggcgcgaggtgcccgcctggccggcctcgtcgcgcacctgtttgttgtgcgcgctctacagtcagaaccgtctctgtttagatctcgcgcgtgacgaggcgcggaccgtgagttatagccccatcgttatccaagactgcgccgcggctgtcaccgacgtcactttgagccacatcttgcccggccagagcaccgtctcgcttttccccgtctaccacgtcggaaagttgctggacgccctctcgctgaacgacgcgggtctcatcacgttgaatctatgacgtcggtcaacaaacagctcttaaaggacgtgatgcgcgtcgaccttgagcgacagcagcatcagtttctgcggcgtacctacggaccgcagcaccggcttaccacgcagcaggctttgacggtgatgcgtgtggccgctcgggaacagacccgatacagtcagcgaacgacgcagtgcgtggccgcacacctgttggagcaacgggcggccgtgcagcaagagttgcaacgcgcccgacagctgcaatccggtaacgtggacgacgcgctggactctttaaccgagctgaaggacacggtagacgacgtgagagccaccttggtggactcggtttcggcgacgtgcgatttggacctggaggtcgacgacgccgtctaacaggtatagcaatccccgtcacgcctctgttcagattttattaaaaaaaaaaaacacaacataacgacagtgtcggtgtggtagctagtgcagctctaggaacagggaagactgtcgccactatgtcctccgcacttcggtctcgggctcgctcggcctcgctcggaacgacgactgagggctgggatccgccgccattgcgtcgtcccagcagggcgcgccggcgccagtggatgcgcgaagctgcgcaggccgccgctcaagccgcggtgcaggccgcgcaggccgccgccgctcaggtcgcccaggctcacgtcgatgaagacgaggtcgtggatctgatggccgacgaggccggcggcggcgtcaccactttgaccaccctgagttccgtcagcacaaccaccgtgcttggacacgcgactttttccgcatgcgttcgaaatgacgtgatgcgtgacggagaaaaagaggacgcggcttcggacaaggagaacctgcgtcggcccgtggtgccgtccacgtcgtctcgcggcagcgccgccagcggcgacggttaccacggcttgcgctgccgcgaaacctcggccatgtggtcgttcgagtacgatcgcgacggcgacgtgaccagcgtacgccgcgctctcttcaccggcggcagcgacccctcggacagcgtgagcggcgtccgcggtggacgcaaacgcccgttgcgtccgccgttggtgtcgctggcccgcaccccgctgtgccgacgtcgtgtgggcggcgtggacgcggtgctcgaagaaaacgacgtggagctgcgcgcggaaagtcaggacagcgccgtggcatcgggcccgggccgcgttccgcagccgctcagcggtagttccggggaggaatccgccacggcggtggaggccgactccacgtcacacgacgacgtgcattgcacctgttccaacgaccagatcatcaccacgtccatccgcggccttacgtgcgacccgcgtatgttcttgcgccttacgcatcccgagctctgcgagctctctatctcctacctgctggtctacgtgcccaaagaggacgatttttgccacaagatctgttatgccgtggacatgagcgacgagagctaccgcctgggccagggctccttcggcgaggtctggccgctcgatcgctatcgcgtggtcaaggtggcgcgtaagcacagcgagacggtgctcacggtctggatgtcgggcctgatccgcacgcgcgccgctggcgagcaacagcagccgccgtcgctggtgggtacgggcgtgcaccgcggtctgctcacggccacgggctgctgtctgctgcacaacgtcacggtacatcgacgtttccacacagacatgtttcatcacgaccagtggaagctggcgtgcatcgacagctaccgacgtgccttttgcacgttggccgacgctatcaaatttctcaatcaccagtgtcgtgtatgccactttgacattacacccatgaacgtgctcatcgacgtgaacccgcacaaccccagcgagatcgtgcgcgccgcgctgtgcgattacagcctcagcgagccctatccggattacaacgagcgctgtgtggccgtctttcaggagacgggcacggcgcgccgcatccccaactgctcgcaccgtctgcgcgaatgttaccaccctgctttccgacccatgccgctgcagaagctgctcatctgcgacccgcacgcgcgtttccccgtagccggtctacggcgttattgcatgtcggagctgtcggcgctgggcaacgtgctgggcttttgcctcatgcggctgttggaccggcgcggtctggacgaggtgcgcatgggcacggaggcgttgctctttaagcacgccggcgcggcctgccgcgcgttggagaacggcaagctcacgcactgctccgacgcctgtctgctcattctggcggcgcaaatgagctacggcgcctgtctcctgggcgagcatggcgccgcgctggtgtcgcacacgctgcgctttgtggaggccaagatgtcctcgtgtcgcgtacgcgcctttcgccgcttctaccacgaatgctcgcagaccatgctgcacgaatacgtcagaaagaacgtggagcgtctgttggccacgagcgacgggctgtatttatataacgcctttcggcgcaccaccagcataatctgcgaggaggaccttgacggtgactgccgccaactgttccccgagtaaccgggacgcggaacgtgacggttgctgaggggaaaggcgacagagaaggtacaaacccaccggcggggaaaataccgaggcgccgccatcatcatgtggggcgtctcgagtttggactacgacgacgatgaggagctcacccggctgctggcggtttgggacgatgagcccctcagtctctttctcatgaacacctttttgctgcaccaggagggcttccgtaatctgccctttacggtgctgcgtctgtcttacgcctaccgcatcttcgccaagatgctgcgggcccacggtacgccagtagccgaggactttatgacgcgcgtggccgcgttggctcgcgacgagggtctgcgcgacattttgggtcagcggcacgccgccgaagcctcgcgcgccgagatcgccgaggccctggagcgcgtggccgagcggtgcgacgaccggcacggcggctcggacgactacgtgtggctcagccggttgctggatttggcgcccaactatcggcaggtcgagctcttccagttgctggaaaaggaatcgcgcggacagtcgcgcaactcggtgtggcatctgttgcgtatggacacggtttcggccaccaagttctacgaggccttcgtcagcggctgtctgcccggcgccgcggcggcggacggttcgggtggcggcggctcgcactacacgggctcgcgcgccggcgtctcgccaggcatccagttcggtatcaaacacgagggtttagtcaaaacgctggtggaatgttacgtgatgcacgggcgcgagccggtgcgcgacggcctcggtctgctcatcgaccccacgtcggggctgctgggcgcttccatggacctgtgcttcggcgtgctcaagcagggcagcggtcgcaccttgctggtggaaccgtgcgcgcgcgtctacgagatcaagtgccgctacaaatatttgcgcaaaaaggaggacccctttgtgcagaacgtgctgcggaggcacgacgcggcggccgtggcctcgctgttgcagtcacacccggtgccgggcgtggagtttcgcggtgaacgcgagaccccgtcggcacgcgagtttctgctttcgcacgacgcggcgctcttcagggccacgctcaagcgcgcgcgcccgctcaagccgcctgaaccgctgcgcgagtacctggccgatctgctgtatctcaataaggccgagtgttcggaagtgatcgtgtttgacgccaagcacctgaatgacgacaacagcgacggggacgccacgaccactattaacgcgagtctcggcctagccgcgggcgacgccgctggcggcggcgctgatcaccacctgcggggcagcccgggcgattcgccgccgccgatacctttcgaggacgaaaacacgcccgagctgctgggccggctcaacgtgtacgaggtagcgcgcttttcactgccggcttttgtcaatccgcgtcaccagtattactttcagatgctcattcagcagtacgtgctcagccaatactatataaagaagcatccggacccggagcggatcgatttccgcgacctgcctaccgtctacctggtctcggccatcttccgcgagcgcgaggaaagcgaactgggctgcgagttgctggccggcggtcgcgttttccactgcgaccacatcccgctcctgctcatcgtcacgcccgtggtctttgaccctcagtttacgcgccatgccgtctctaccgtgctagaccgttggagtcgcgacctgtcccgcaagacgaacctaccgatatgggtgccgaactctgcaaacgaatatgttgtgagttcggtaccacgcccggtgagcccctgaaagatgctctgggtcgccaggtgtctctacgctcctacgacaacatccctccgacttcctcctcggacgaaggggaggacgatgacgacggggaggatgacgataacgaggagcggcaacagaagctgcggctctgcggtagtagctgcgggggaaacgacaatagtagcggcagccaccgcgaggccgcccacgacggctccaagaaaaatgcggtgcgctcgacgtttcgcgaggacaaggctccgaaaccgagcaagcagtcaaaaaagaaaaagaaaccctcaaaacatcaccaccatcagcaaagctccattatgcaggagacggacgacctagacgaagaggacacctcaatttacctgtccccgcccccggtcccccccgtccaggtggtggctaagcgactgccgaggcccgacacacccaggactccgcgccaaaagaagatttcacaacgtccacccacccccgggacaaaaaagcccgccgcctccttgcccttttaacccataaactttcaggtctcgcgtacgattcgcgagtcgggaatgggacacccgtgggtgtttctccgtgtgtatattattttttttttgtgtgtgtttgcgcccccgtgtgtctaatgtgctgtttgaaacacgtaaagtagctggtggaagaacagataaacctttaataaaaaaaaaagtatgtgctcccgacccacggtctgcgtgtctcttttttatgtccatgtctccaagtctggtgcgggtggcggcggggtcaagcgtcctcgaagtcttcatcatcgtcgtcgtcctcttcttcgcggaggcgacggctttccaagctgtcgtggtgactgagtgcagcgacttcttcgccggaggctgtggccagcgcctggtacttaacactgccgctaccgcgtccgcgaaagtaacggacggcgcgacacgtcgtaaacatggcccatatgaaaaagagcatgccgaacgaccagctgatgccggtgcggtattcgttgctgaggaaggtatcgtactgcacgatggggtagatgaggccgcagagtccaaagaaggcgcccaggtggtagccgaattgcaccttgacgtattgaaaaaagacggcctcgatcagtaaaaagtagatgatggagatgatagcgtagaccacgaagacggctaacaccatgtggcctgtacgcacgaaaaagttgtttctgaagccgtagcatagggccatggctaccacggtggtgttgaaaccaagcgctacctccaccaggttgacgatgagcgtgcggaactgcaccgtacctttgagcttggggtgcagacgcgagaagaaaaagagcgagcgtttgtagctgcggtactgcgtgaccatgctcacgttgaaaatggtcaggcagaaaaagtgcacggcggccatgaaggcgatcatgctgggcagccgaaatgacatggtcagtgtgaatagttggaatgtgtccatgctgaggatgaaaaggaaggctgtgaggctgtcgcccatgtacgagatgtcgcgtgtcgactggtttaggctcatgcctttgtccttgcgcatgctgatcttgatccagcataccaggtagtagatggtcacggctaaaaagacgagctgcatgaacacggcgtagcacaccagctgcaccgagtctaagaaaagcataggcgtgtgcaggtgcattacgttgtaggccgacatgttgagcctttcaaagtccacgacgtgatagtagacgcaggggtagcccaggtgcggaaaattgctcagcaccagatgcacgctgacgttgacaaaagtcagcaccatgaaaacgatagaagcgctccatgtccgtgtattcaccttatccacgtgcgagggggccatggcgatagcggcggcccgctcgctcgggaggcgatgggggcgcgccgatgacgacaggctcgcgggtcgttaaatactacgatgggagccgccgcggctcacgacgcggtttgagcgcgtccgggcggtcggcgaaaaaagaccccgcgggccttcgcgactctcttctgtccgaggatgaccgctcagccgccgctgcaccaccgccaccacccgtacgccctgttcgggaccagctgtcatctcagctggtacggccttctggaggcctcggtgcccatcgtacaatgtctgtttttggatctgggtggcggccgtgccgaaccgcggcttcacacgttcgtggtgcgcggtgaccgtctgccgccggctgaggtgcgtgctgtgcatcgcgccagctacgccgcgctggcctcggccgtgactacggacgccgacgagcgccggcgcggcctagagcagcgtagcgccgtgttggcgcgcgtgttgctagaaggcagcgcgttaatccgcgtgttggcgcgcaccttcacgccggtgcagattcagacggacgctagcggcgtggagatcttggaggccgcgccggcattgggcgtggaaaccgcagcgctgtcgaacgcgcttagtcttttccacgtagccaagttagtggtcatcggctcgtatcccgaagtgcacgagtcgcgtgtggtcacgcatgccgcggaacgcgtctccgaagagtatggcacccacgcgcacaaaaaattgcgtcgcggttactacgcctacgatttggccatgtcgtttcgcgtcggcactcacaagtatgtgctggagcgcgacgacgaggccgtcctggcacgcctctttgaggtgcgcgaggtgtgttttttgcgcacctgtctgcgtctggtcacgcccgtcggtttcgtggccgtggcagtgaccgatgagcagtgttgtttattgctgcagtcggcctggactcacctttacgacgtgctttttcgtggtttcgctgggcagccgccgctacgcgactacctggggccggacctctttgagacgggcgctgcccgttctttcttttttcccggtttcccgcccgtgcccgtctacgcggtccacggtctgcacacgttaatgcgcgagacggcgttggacgcggcggctgaggtgctctcgtggtgcggcctgcccgacatcgtgggctcggccggcaagctggaggtggaaccctgcgcgctctcgctcggcgtgcccgaggatgagtggcaggtcttcggcaccgaggccggcggcggcgccgtgcgtctcaatgccacggcttttcgcgagcgaccggccggcagcgatcgtcgctggctgttgccgccgctgccgcgtgacgacggcgacggtgaaaacaacgtcgtggaagtcagcagcagcaccggcggtgcgcacccgccgagcgacgacgccactttcaccgtgcacgttcgcgacgccacgctacatcgagtgctcatcgtggatttggtcgagcgcgtgctggccaagtgtgtacgcgcgcgcgacttcaatccctacgtgcgttatagtcatcgactccacacttatgcggtttgtgaaaagtttattgaaaatctgcgttttcgctcgcgacgcgccttctggcagatccagagtctgctgggctacatctccgagcacgttacgtcagcctgcgcttcggccggccttttgtgggttctgtcgcgcggccaccgcgagttttatgtctacgacggctattcgggtcacggacccgtctcggccgaagtgtgcgtgcggactgtggtcgactgttattggcgcaaactttttggcggcgacgatccaggtcccacctgtcgtgttcaagagagcgcgcccggcgtgctgttggtctggggcgacgagcggttggtgggtcccttcaacttcttctacggcaacggcggcgccggtggtagtccgctccacggggtggtgggtggtttcgcggcgggacattgcggcggcgcttgttgcgcgggctgcgtcgtcactcaccgccattctagcggcggcggtggtagtggcgtgggcgacgcggaccacgcgagtggcggcggtctagatgccgctgccgggagtggtcataacggcggtagtgatcgggtttctccctccacgccgcccgcggcgttgggtggctgttgctgcgcggccggtggcgactggctctcggccgtgggtcatgtcctgggccggctgccggcgctgttacgggagcgcgtgagcgtgtccgagctggaagccgtgtaccgcgagatcctctttcgcttcgtggctcgccgcaacgacgtggacttttggttactgcgcttccagcccggtgaaaacgaagtaaggccgcacgccggggtgattgactgcgcgcccttccacggcgtgtgggccgagcagggccagatcatcgtacagtcacgcgatacggcgttggcggccgatattggctacggcgtctatgtggacaaggcctttgccatgctcacggcttgcgtggaggtctgggcgcgagagttattgtcgtcctccaccgcttccaccaccgcttgttcttcttcttccgttctctcctccgccttgccgtccgtcacttcgtcctcttcgggcacggcgacggtgtctcctccgtcttgttcttcttcgtcggcgacttggctcgaggagcgcgacgagtgggtgcgttcgctggcggttgacgcgcaacacgctgctaagcgggtggcttccgagggcctgcggtttttccggctcaacgcttaacgagtcacgtaggggaactacgtgggtaagtgacgtggatactagtaaaaaaaagtgcgtcaaagctctcagcgtgtgacgtggatactagtaaaagggacgtcaaagctcactacgtgttgcgtgtttttttttctatgatatgcgtgtctagttcgcttctcactcttcctctccccgttcccagcgcggtggcagcttggggggtgagggcaaattggggtagttggcgttgagcacgtctagcaggcccaggcccacgggccaaccgtccacggtcttacgctcggtcagcttgaggctgaacgagtgtgcctcgtcttgaccggtaaggcggaaaaagaagcgtgctaccagctgcaggcaggtatgctgcgtctgctggaagagcacgaaggtagcgggtacgtactgcacaatgtgcggttctttttcctcaaagagtaggtagagcgcgctgcagatcagccgccgggcgctgtggtgcagcagccggccgaagctttcgcgcacgttcaccgcgtccaggtactggagcaggtcgtgcaggcacttgcgcgttaagttgcaattttccacgcatgaaataacggtacagagcgcgaagtgcagcaggttgtcggccttgacgatgccgcagcggtgtttgagccgcagatccgagagcctcacctgcgtgacggcgtcttcggtctcgagcaaaaacacggcggagtagcccagaaaggccgaggtgcacagcagctcgctgcggtactcggccatggagaccagcagcccgtgctccgtgtgcagccacagcttgtcgccgcgcaccgtaaagtcgagcacttgcggctccatgatcatcacattctgtctagtgaaatccgtatggacctccagcacgccgcggatcatcagggcctccatttcgaaatcggccgacacgctctgggccgcgccgctcctcgtctgccgtgatcaggcggcgcggcgcggacctttcaagcgttcctgggccgccgctcgaggcagttcccctttctggcactccgcccgccgcttcgcggctcatttggcgtcggcgcgccttctcgcggctgcaaatcagctccacgtatcggcaaaacttgctgtcgtcgtaggcggcggccacgatctcgccgaaggagagctgcaggtaggcctcgggtacggggtccagcgtgcccagcgccaggatgtgacacagatagggcagggtcacgcgctctaccgtgtaattggagtagacgatggcctcttcggccccctgatgcgtgaccagacgccgcaggcgaaaggtgcggaaatactcgttttcccacagctgcgtgaggaagcgttccagcgactcggtgccgggcacgaactgcgagaagaagctgttggccaccaggcggttgtcctccaccgccaacggacggaaaggcgccgcgtcgcgcgccttgcgcacggcctccaacacgggcaggtggtagagttcggcgtcgcgcgcgcccaggctcatggagtcctcgcggcgcgaggcgtagcgcgtgagcaggtcgcgcagttcgcgcacgcgattctcccaggtctggttgagcgtgcgcaggtcctggatctcgtctacctgcgactggatctgctcctccaggcacttgatgacctgcttcttaaacaggtcgcggatgtcccgctcgggcgccgccgggccgggtggcggcggcagcagcccgacgtggcccgcgggtcctcccaccacggcaccgccgggccccaccacgccgggtccacccggaccacgcgcgggtagcagacggttttggtccaccagcgaaggggtcaagtcctgcaggaaggactcgacgctgtcctcgatgccgatgcgcgatttgctgtccgagacgttaagcaaaaacttcataatggactttttggcgtcgctgccccggtcgtgctgctccatcatctccaccagcttcttgcagttgagctcgtggcggctggcggtcaccactttcacaggaaaggtattgagcaactggcagatcttttggtggcggcagagcccgtcgtagcgcagaatctcctcgtgcaggtgtgccaccggcgtggtgaacagcagcttgtcgcgctcataagccagcggttcggtcgccacgtacaagcggatgtgcttgccgcgcagctgcgcctccagccgctccgagcgcaccttcttgaagacgcgtacctcgggcgcgttggctacgcgcacagctcccaggcgctcggccacctgcagcagcagcgccaggttagcctgcagcaggtcctgcgccagcgggtgtgtctcggtggctcgctgcacggccgcgcgtacaaattgcgcccgctcggccgcctcgctcggcttggtcttcacgtccagcagcggtaccagtcccaccgttacgcaccaatccacgtagagaccatagtcgtcgttatcggcgtactgatataaaatgtcgcggagcgcgcccagcacgcccgtttgcacgctctggcgcaacgaggcgctccacaccaacagatactgctccaggtcctcttcgtccagcgcgcggtagggaaacagcgccgcgtgcaacttccactcttcggccacgcgccgcaccgtgatggtgtcaaagagcgttttgcacactccgtagagcagctgcttgcgcagcacgcacgggtcgcgcagcacttggtgcatgctttggccgcgacacgtccccagaaagccgtgcagcaaccgcaggaagctcatcgtctggcccgtggggaaaatgtcgatgacggcctcgtcatccacaccgcggcccacgcccaagtacgacgacgccttgatcctcaacctctcgtcggccgccaagatcgaacggatcgtcgacaaggtcaagtccctctcgcgcgagcgctttgcgcccgaggatttttcgttccagtggtttcgctccatcagtcgcgttgaacgaacgacagataacaacccctctgccgcaactaccgccgcggcaacgacgaccgttcactcctccgcctcctcttctgccgccgctgccgcttcgtccgaggccggcggcacgcgcgtgccctgcgtcgaccgttggcccttctttcccttccgcgcgctgctcgtcaccggcacggcgggcgccggcaagacttccagcatccaggtgctggcggccaatctagattgcgtgatcaccggtaccacggtgatcgccgcgcagaacctcagcgcgatcctcaaccgcactcgctcggcgcaggtcaagaccatctaccgcgtcttcggcttcgtcagcaagcacgtgccgctggctgacagcgccgttagccacgagacgctggaacgctaccgcgtgtgcgagccgcacgaggagaccaccatccagcgcctgcagatcaacgatctgctcgcctactggccggtcatcgccgacatcgtggacaaatgcttaaatatgtgggagcgcaaggccgcttcggcctccgccgcggccgcagccgccgcctgcgaggacctctcggagctgtgcgagagcaatatcatcgtcatcgacgagtgcggccttatgctgcgctacatgctgcaggtggtggtgtttttttactacttttacaacgccctgggcgacacgcgactttaccgcgaacgccgcgtgccctgcatcatctgcgtcggttcgcccacgcagaccgaggcgctggagagccgctacgaccactacacgcaaaacaagagcgtacgcaagggtgttgacgtgctctcggcgctgattcagaacgaggtgctcatcaactactgcgacatcgccgacaactgggtcatgtttattcacaacaagcgttgcaccgacctggactttggcgacctgctcaagtacatggagttcggtatcccgctcaaggaggaacacgtggcctacgtggaccgcttcgtgcggccgcccagctccatccgtaacccctcgtacgccgccgagatgacgcggctttttctctcgcacgtcgaggtgcaggcttacttcaagcggctgcacgagcagatccgcctgagcgagcgccaccgtctctttgatctgcccgtctactgcgtggtcaacaaccgcgcgtaccaggagctctgcgagctggccgacccgctgggtgactcgccgcagcccgtcgagctctggttccgccagaacttggcgcgcatcattaactactcgcagtttgtcgaccacaacctttccagcgagatcaccaaggaggcgctgcgccccgcggccgacgtcgttgccaccaacaactcctccgtccaggctcacggagggggaggatctgtaatcgggagcaccggcggcaacgacgagacggcgtttttccaggacgatgataccaccaccgcgcccgatagccgtgagacgctgctcaccttgcgcattacctacatcaagggcagttcggtgggagtcaactctaaggtgcgggcctgtgttatcggataccagggcacggtcgaacgtttcgtggacatcttgcaaaaggacacgtttatcgaacgcacgccctgcgagcaggcggcctacgcctactcgttagtttcgggcctgctcttctcggccatgtactacttctacgtgtcgccctacacgaccgaggagatgttgcgtgagctggcgcgcgttgagctgcccgacgtgagttcgctttgcgccgctgccgccgccacggccgccgctcccgcttggagcgggggagagaatccgataaataatcacgtcgacgcggattcttctcagggcggccagagcgtgccggtatctcaacggatggaacatggccaagaggagacccacgacatcccctgcctgtccaaccaccatgacgactcggacgccatcacggacgccgaactcatggattacaccagtctgtacgcggatcccttttttctcaaatacgtcaagccacctagcctggcgctgctttctttcgaggagacggtgcacatgtacactaccttccgcgacatttttctcaagcgctaccagctcatgcagcgtctcacgggcggtcgcttcgccacgttgccgctcgttacctacaatcgccgtaacgtggtgttcaaggccaactgtcagatcagctcgcagaccggctccttcgtgggcatgctttcgcatgtgtcgccggcgcagacgtacacgctcgagggctacaccagcgacaacgtgctcagtctgcccagtgaccgccaccgcatccaccccgaggtggtgcagcgcggcctttcgcggctggtgctacgcgatgcgctcgggttcctctttgtgctcgacgttaacgtttcgcgcttcgtcgagtcggcgcagggcaagagtctgcacgtgtgcaccaccgtggactacggcctcacttcgcgcacggccatgaccatcgccaagagtcagggcctgtcgctcgagaaggtggccgtggactttggggaccatcccaagaacctcaaaatgagccacatctacgtggccatgtcgcgagtcacggaccccgagcacctcatgatgaacgttaacccgttgcgactgccctatgagaagaacaccgctatcaccccctatatctgtcgcgcgctcaaagacaaacgcaccacgcttattttttgacacaacaccgtgtaaggaaaacgtgactttattgagcagggtaaaaaccacgtacaagaaccacgttgtctatccccaaaaaaacacacaccgtcagggaacacatcgcctatagatagcggcactttacataaaaccaccgtacctgcatcacggtggctcgatacactggaaattcaataaaaaccaccgtatctccgtgacagtacttatcgggtcagcgtctttctcttgagatttctgttcgtaaacttatccgtttccccggtccgcggtgtctcctcgcgaggctgacagtctacgggtggtacctgcaagagaagaaacccgggtgggagcgacgccgtcgctgggtatcaaccccgcggctgaccgtcgtccggtaaaggaacgacccgtcgtcgcaagccgggttcgaccaagagaaaaaacccgggtgcggggggagacgggtcgtcctttggttgttcgcggacggcgtacatgccgcgtgggtcagtcgacggcgtcgctccgtgcggtcggtcatcattctgcttcacatatatgggttgtttgtgttttttttataatgaatacgcactgatcctatccgtgactgcgcgtgtggcagagaggatgccttataacatgtattttgaaaaattgccaacagctataatttctctcatgtagcagaatagagaccttttgtcgtctttttgtttgtcattacttgttttccagggaattagagagagggaaccgcgcctccggcggcggtgcccgcggaccccggccccttctcgcgtgcgcggtgtgactggttgagcgaatgagcagctaggcttggtggtgctccgcgtgcgggggagaagacgattaacaacaaaaaataagtggaagtggccggtgggtctttgtccgcgtgcgcgcccatccgtcgccgggaccgagcagaaagtgatgtggtggtacattgattttttccttgacaggaaagaaaaaaaagagttttgttttcctatgtgagaggagaaaggtatgtgaggagatgttcgatgatcgtatgttacagttatgctgtaaggaagcttttatcgtgcgtcctgtttttcatttgatgtatatgacacaattgaaacctatcgataggcgtatatcgaggattcatcaattcttagaatcgtcgtctttttggctaattggactttgcccatgttggttgtcattcgtggcctgaggtcatcgtcgtccacgacgacgtgtctatagcgtgcggtgtgatcattgtgtcgagccagagaaagcgcgcctcgcacgacgtttgcggatcggctcgcgggtgtgtggaattcctaagaacataatcagctggtcgtctttctttgatgtgttgttgtcgtcgaggtcttgcttcgttttcttttttctttttagtcgatggaacttttcttcggtacgggttcttgttatggaagcttgtgttttcgaacatgaattcgaaaaaataaaaaggcctatcttcgtttcaaaaaaaggacagatatcaatcttcttaacttatatcatggtaaattcagaatcctatggtgtcttattatctctaaagtagtcaacattatggtctaacttgtatttccctgacgagatatatatgatccttataacctggctactatcatgaacaacaatatccttacttacagtcatcttcgtgagttaatgaagtataatatcggtcatctatcaacttatctgctatgtaacgtacccttttaggtattttgcgtttcttaacgagtgtacccgcctgtgtgaggcgaaactctgagaagtctaccgagtcgagttacaagtcactaaaacacttacacgagttatctatactaaaatcactatctatgttgtttgcttacctaattattatcctacatgacgaagctacctcccaacgtaaggtagggggagaggagacagaacaataaaaagtaactaatgtttcttagaacttacccgctaaggacttaccaaactatattcaccaaaaaacaacagctacgtgtttcatttgttttaatctaccgaagtaaaaaaaaaaaagatgattagctatccagaacctacttacttcttaatgttttaactaaggatgcctatgggattggaaaaaaaatcacagcaacttgctactaatcagttgacagcgaagagactcataacaaagatttctgggtaatacggttataataatgcttatggactaaaggatacttggaaaaaaagaacgggctatgactatagagattcgtcgagatatcaaacttcaaataggcggctatcattcatggttgtggtgactatatcgtggagaaaaaatgtgatcgttagttagctaggtgagacttacagctatccatccgtctagtttttcgttgtaatgatgatagtacgtctatggtggtgatcgattttggttaacaatttgttcgtttaaaggcttaatgtacttatgctacatgatgtattattctttgattcatcgttcctcctaagggggtgtatgtatgtatgtactagtcgtatagtgttcctaacatcatgactattcagactatggcttcatctatcgtgtctaaagttcacttattctactattactatatatatgcactactatgtaactaggatatggtcctataaggtgtcttctatcacggtggcttgtttatcgcttggcggttacgagcaagagttcatcacggaccagccgtgaggcagggcacacgcgggtcggcggcgataatgtccctcgcgaaggggacaacgaaaacaagaggccgccggccgcggccacggacgcgtagcggttacacaatgtttggttgagcgttttgtttcatcgtcgtggtggttttgttgttctctgtatatatcgtgtggtggctttatcgtcatcattattatcatcattcttgtttccatcatcacgatgagttttctccgttttcctctcctccagtggtagtcgtgtatcatcatcaatcatcgtagtgacgtcgttgctgctgctgctcttgccttcatggcggtatttctcttcctcccccctaaccccatattaactcgtgagtgtgatggttagagtggctgcttgttttttttttcttttctctttggaacaacaaaagaggataaagatggtcggtgaatgtattattattattatcatcattatgatacggtcgcggtcttcttctccgatgacgaaacctgcgcacatcgaagaaaagacgagcgcgcgaaccgatagccgtccgtctgggacgaaggagaagatgatggggagaggaggagagccccagaagccagagcgagaggggagacgacagacatacgtcgtcaccgtcctctggaggaggcacggcggcgctgtttgttgtttggatgcttgattatatcctgttctatggggtagattattatcaataggcttggttttcaaaggtcagcctgtgtattgtcgtgtcttttttttcgttctcatgatcgcggagaccacacagacgtgcgcgtctcccaatggctaggcgttctttttaggtagtaattttttgatctttttttttcttaacaagtctggcttgatttcttttatctatgatcgattcttctttttctcgggggttgcatcttccgtgaaagtaaagtgacactactctaaatggtaaccatattatctgttgattaggagaaaaaataattttttcgcacgaaatcgatcctaagtgaggtgatttacttgctatcacacgaaatgattatcttttgctgctaacgtactgaattttttaacagaattgcttctccgtaactatttccgcagattcagacagattgtcaaaaaaaaatacggcacagaaatagtgggtctgtggcttttggttcgtgtacattcgcgtttgcgtgtcgagatttctacggtatgtttattcttcctgcgatgatgtagggtccttggtgtaagtaggatttcgagtatctctcttagagcgaacaaaataatcaaaaaacaacagctaggaaatcgagggttactctacgataaagtgtctctacaaagtgaagaatgttacgttgtggtggaataataagactcgcgtgatcgatgagtgatcgagagcggctcgaaccttctttaagagctttgtttagtgcaactttaaattacaaggagtagaaagctgaaatgaatctatgaaggtgctattctttgaatatcttactttgtacgcttcacattcgttatttggatagagagttgtctagagaaaatctgtgattctctatgagtgttatttttattatccttttggggactacgatttttcttcttgttctacataccactactactcgtaatcacatacatggacgaaaaaaaaattcgtcaggcagtagataccagattctccgacgttacggcgtctttttttcttttgagagagtatctgctgagattgtccgtggtgtatctagtcgctatttttgttgttactagtagttttgcacacagtttattcagtatagtttttcttcttgccatgatcaattgagcccaccaccttttttttaagagaggaggaatttcgtcttgatctccagccggagataacggcggtggtggtggtggcgggagagacttcaaggcaatgaaaaaaaaaaatttcgttttgccatcaagtggtgacgataacccgtcagattgataattggttcctacagaaactattctaaccgcggaagaaagaaattgaaaaaaaaaaattgacaaaaaacatcataacataaaggaccacctacctgggacgcgcagttgggcggcggactggggcggcatgctgcggtgatgctgtcggtgatggtctcttcctctctggtcctgatcgtcttttttctaggcgcttccgaggaggcgaagccggcgacgacgacgacgataaagaatacaaagccgcagtgtcgtccagaggattacgcgaccagattgcaagatctccgcgtcacctttcatcgagtaaaacctacgttggtaggtcacgtaggtacggtttattgtgacggtctttcttttccgcgtgtcgggtgacgtagttttcctcttgtagcaacgtgaggacgactactccgtgtggctcgacggtacggtggtcaaaggctgttggggatgcagcgtcatggactggttgttgaggcggtatctggagatcgtgttccccgcaggcgaccacgtctatcccggactcaagacggaattgcatagtatgcgctcgacgctagaatccatctacaaagacatgcggcaatgcgtaagtgtctctgtggcggcgctgtccgcgcagaggtaacaacgtgttcatagcacgctgttttacttttgtcgggctcccagcctctgttaggttgcggagataagtccgtgattagtcggctgtctcaggaggcggaaaggaaatcggataacggcacgcggaaaggtctcagcgagttggacacgttgtttagccgtctcgaagagtatctgcactcgagaaagtagcgttgcgatttgcagtccgctccggtgtcgttcacccagttactttaataaacgtactgtttaaccacgttgcgtcgtgacgttgtttgtgggtgttgctaggcgggctggaaagatgatgtataaatagagtctgcgacggggttcggcgctctgccggctgcggcggcactcgctccacggcctccgacgagcgttgcgctcgcgctttgcgccgccgcgtcatggatctgcctactaccgtcgtgcgaaaatactggacttttacgaatcctaaccgcatcctgcatcagagcgtcaatcagactttcgacgtgcgccagttcgtctttgacaacgcccgtctggtcaactgcgtggacggcgatggcaaggtgctgcacctcaacaagggctggctctgcgctaccattatgcagcacggcgaggcttcggccggcgccaagacgcagcagggcttcatgtccattgacattacgggcgacggggaacttcaggagcacctctttgtacgcggcggtatcgtctttaacaaatccgtctcctcggtggtgggctccagcggacccaatgagagcgcgctgctcactatgatttccgagaacggtaatttgcaagtgacttacgtgcggcattacctgaaaaaccacggcgaatcctccagcggaggcggtggttgcggcgccgcgtctactgcctccgccgtctgcgtgtcctcgctgggtggcagcggcgggactcgcgacggcccttctgcggaggaacagcaacggcgaaggcaggaacagcgtcacgaagaacggcgcaaaaaatcgtcctcgtctgccggtggtggtggaggcggcggcgctggtggtggcggtggcggcggcgggagcggcggtcagcactcctcggactccgccaacggactgctgcgggatccccggttgatgaaccggcagaaggagcggcggccgcctccctcctccgagaacgacggtgagtcccggccctcctcgcgtcacggtgctttccgagtggactcgtgagccccccgtagcgcacgagcgagcaggcgagcggtgttggtgcgctggtggttgtgtggatgataaccatgtgctttttcgtgcgctatgtgtcgtcccgtctgtaggctctcctcccctccgggaggcgaagagacaaaagaccaccgcacagcacgaaggccatggcggcggcggcaagaacgagacggagcagcagtccggtggtgctggcggtggtggtggcggcggcagcggccgcatgtcgctgccgctggacacgtctgaagcggtggcctttctcaattactcgtcctcatcctccgcggtctcttcttcctccaacaaccaccaccaccatcatcaccaccataacgccgtgacggacgtggccgccggcaccgacggtgcgttacttctacccattgagcgcggagcggtggtttcgtcgccgtcgtcgacgtcgccgtcgtcacttctttcgctccctcgacccggcagcgcccacagcgcgggcgagacggtgcaggagtccgaggcggcggcgacggcggcggctgcggggttaatgatgatgaggaggatgaggagggctccggctgaggcggcggaggcaccaccgcagtcggaggaggagaatgattccaccactccagtctctaactgccgtgttcctccgaattcgcaggaatccgcggcgcctcagcctcctcgcagtccgcgttttgatgacattatacagtcattgaccaaaatgctcaatgattgtaaggagaaaagattgtgcgatctccccctggtttccagcagactcttgccagagacgtcgggcgggactgtcgtcgtcaaccacagcagcgtcgcgaggaccgccgcagctgtctccacagccggcgttggccccccagcagccgcatgtccgccactcgtcaccaccggtgttgtaccctcaggttccgtcgccggtgtcgcgcccgttgccgccgcagtcgaaacaccagctgctcctccccggcccgtgtgtgaaatcaagccctacgtggtaaaccccgttgtcgccaccgccgcggctgccagtaactcttcctcgtcttcttcggctccgctgccgccgccgccaccaccgccgggcggacgtcggggtcgggcccggaataatacccgaggaggcggcggtggtagaaacagccggcggcaggccgcatcgtcgtcgtcctcctcctctcggagatcgcgacggagaaacaaccgccacgaggacgaggaggacaacgaccctctgctccggttgtcgcaagtcgccggcagcggccgccggcgagggccctcgttcctcgaggacggactcgaaattatcgatcccagcgaggaagctgcgatcgccgccgcctcgatcgcggcgtttttcgacgattaaaaaaccgagccgagaccggaaaaattatgaaacaggacgcgcttggacatttgggtttccaccccctttggtgtgtgtctatatatattggtcactgattttttttacaataaagagatagacatcacagttcaccaccttgtctccccggtgtgtctattatcatcaatcacccacagagtcgccagtccatggtctctcggtaatgcgtgtccagatacgcgttggccagtataaaatggtcgttgcccacaaaggcgcgggtggtgttgcgcggcgacgggtggcaggacttgagtaccaagtgccgccgtcggtcgatcaggtactcgcaggtgtgcgcgtcggcgccccatagcatgaacaccagatgctcccggcgctctgacagcctccggatcacatggttactcagcgtctgccagcctaagtgacggtgagatccaggctgtccgtgcaccacggtgaacacggtgttgagcagcagcacgccgcgtcgcgcccaggcgtccaggcaacccgaggccggacgctgaaacccgtccaccgtacgcgccagttcgcgaaacacgttgttgagggagggtggcggcggtcggcccgccagcgtgccgaaggccaggccgctggcgctgccgtcgcagtacgggtcctggcccacgatcaccacgcgcacctgctcgggcggacacagatagctccagcggtgtacgtgctcgggtgccgggtacaccatctcgagttgccgcgcgccctccaccgccgccaccgtgtcgcgcagcagcaccgtgtcgtggtcgggcaagctgaggaagcggatccagtcggcgctcagacaaaacacgcgagcctgctcgtcgggggttaacagagagcctttattatcagcaatgttagcgagcatccactgcttgagggccatagcgcgagtgagccggcaggttgacgcgcgtctgcttcagctcgggcggcagtccggcgtagtatttatctaggtggcgtagcagcggcgggtccagctggtgacgcaggcagaattccttcactgcgttgtacaggccgtaaaagagcgtgatgccctcgggcgcggcagcggtgctcacgggcagacgcacggcgcggttggtacgcgtggcttcgttgcgtatggccaccaccacgttaaagagagacggtggcaccagctcgaagcctaacacgtgttccgtgaagatgctgcgcccgtatgacagtcgcgtgaggtcgtagccgcggcacaggtcgtccacgcacgtgtacacggccggcgagccatcgccgcactcgctgtaaccgcgcatcaccgtcatccagcgcggcgctgtgtccgagctcaacagcgtcagcaaggcccgcaattgatccggattgttgtacagcagggccagagtgtccaggaaagcatcgtccaacagcacggagttggcggcctccggcgtaacgggacggtaacgaataagttgcgatagcgggccatcgcgtctggtaacattcaccaacgggcgcagccaactttcatacttgtcaccctgaaacacctcacccaacaggcatcgacgcgttagttcggggcactccgcgggaactttctcggcgacggtaggagcgacgctgacggtggctgaggaaacgatgggcagcagaaggcaacaccacagcagtgccaccggtccaggtgagaaagagaagccgcaatccgggcggcggcacatcaagtctgcggcacgatgagagtgtgacggtaaggagccagttggcgccgaaagttggcgctcaggtcttcgatccctaaaacgttatatattgcatccagcaggtgagccaggctaaacggattcacgtaccaggtttggttacccgcgacgataacggccagaccgtgggcgctacagttggagaggttcctgggtacgaaggtaactgagtcgatgtcgcgccacggggggaatgagacagacgactggcgcacgctgtaatcacaactgtgattgacgtattgtagcgtgtaatttaggttgcactcagcctcgaagtagagggggaaccacagttcgtcgtactcgtcgtcgtcctccagttctggctcttcttcatccaccgcaatgtctacgctgctctgagattcctcttcgtacaggatgattgacaggttatggctacaaaggtcctgggcgggaggacgcgtgggagcgcgggtggtggtaatgttttccagatcgtcaaaagtcggagtgtagtctgacgccgtgacgacaccgtcgacggagatagtagaagttgcggccggtgtcacggtggtaagtatggatacagaaggggagggggaagtagcgttcgtaccgatggttgtggtattattattccttgtatttcttgtttcagaaaccgttgacgttgagatgggaatcgacgtggcgctggacgtcagattgctgaccgaggaaaccgtggtgggagtggtgacggtgttactcgtggttgaagtgacgttaggggaggtagtagtggtaccggtggtggcgacggtagtgtttgtcgtggcggcggcagcggtggtactggtaacggtggtcgcgttggtttccaccgcttcacacagtaagcaaaagcacagggccaggaaaagcaaccagccccgccatcgccgccgccgcttcatgaggtgggcaggcgaaagctggtgaattcgttgtacagcggcaagtggggcgccgcgatcgaagggtacgtcaacaagctgacgttgatattaaatacgtctggctgcttttctacgatggaagcgcacagggttacggcgtcaaacaggtctttcttggtggcgcccgagacccacatctggtatacacccgtctcgtggtacgaagtagagcgcggcaccaccggacggatgcagtccagaacgcggttgggatcctggtgaaagaatttgaacgtggctacggcctgtggcgtgtgcggcatcgtctgcgtgatgagctgctggcccgctaacacggtgacgttgtgcaacttgagcagggcactcttgagggcctggaaagcgttgccgcacgaggcgctgatctgcagctgcacggccgtggagtcgtgcagccgcatgagacgtgatacctcttcgaagacgtacttgtatttgctggcaaagagtggcgcgtaccgacagtcggccggcaaaatgtaggtggcgttaccgccgttggtggccacggcgggcgcagcggccgcggaggccggcgtaaacagcgtcagcggccggtggtggctggtaaggtcgatcatgggcggcgtggtgaccgtggcggtggcgggcatgacggggtttgcggcgacgggcactccggccacagcggcggcagcggcggccacggcggcgctggccgagcccacacccgccggcagtcctccgccacccatgacgccgccgggcagagcgtcgcccagacagacttccacagtggcgggcgcgctctcggcggtcagtacggtttgccgatcgacctcgcgacgaaagctggtgaggaactcactatgatccatggccgcagggcccgagatcccgggattctgcgggtgctgaccgagtgcgggccgagttatatggaagacgattagcttggagcggagttttgcgtccctagctgacctgcggatcagcgacgtgccatagggatagactgtgagcggcggccgcaacggcggggtcggccgccgctcgtcgtcacggggcggcgcgagggaggaggaggtggtgggtacgatcttgacgtggttgacgtcctgcccgtccgggggaatacgcaaaaaaccccgccgcggcgctaccacgatggtgcgatgggtctttctcttgttggccggggccagggacttgcagatgcgtgtggagccgtagacgatctggacgtggtcctgggagaacatgaccatcgccgccaacgctcagcggggggacgggttgggaacacagaggctgaggggaaaccccgtagaagtcagcgaaataaagacaacacagcagccgctcctctcgtttctggccctaccactgcttgaagtagggcaccgggtgtttcttttcctcaacgggctcctccagtctcttataggaccagtcccgccggcgcgccagcatgtaggtcacgtacaaaagaataattaccatgaacaccaggaaagccagcacgccgtaggccagcagccggtcctcgaacagcgggtcgctcttgataaacacgtaggtggtggtaaaacttcggcccgcgatctgaacgtggagacgcacgacagtatacgtgccgttgaggtagaagacaaactcgcgtaaccgttgtccgttatacgtcacgttactaatattccacggcggaatgagctggtcgccctgatgcagatgcacggtgctgtttgggtgatagaggctgctaccgttgagcaagcagtgttcgtgttcctgaagcagcacgcggacccgcatcgtggtagcgttcaagcgagtcccgtacacggcgtagatgggataggtgaaaaggtcccaagtggcgttgtgatggcggccccagctgaaaaaagagcacgtgtactcagtggtctcctgcggcctgagtcccgagataagcagctcttgagcagtagcgttgtaggagagatgtagttttcctgtggataaaattcatatgctgtttattctgttagcaggttggtgggggaggaaggggaatagaacagaggcggtattacttacctttatcaccgggcgcaaaagcgctaagataccccacctgagtgaagggacccttgcagtctgtccgtgcataacaggtaatggacaaaatgtcgggatttacggtgttgttcaacagggacactttacaggtggcgttgagagacacctggtcgtagctgtagctggcttcgcaattcacagtatacaggtgcccctctttctgcgtcgtggctgccacggaggtagcggcggatgtgaaggtagagccggacgtggaaatagaggtttgtaccgtggtgctgacggcagaagtgacgttattagaggtacttattgacgtagtggacgtgacggtggtattaatgggggaagtgacggcgcttgtggtgctactttccactcccgggtgcgtgtcgcctaagagcgtaaccatgagcgcgatcgccagtacgggacacatgttgccgtgtgacgagacggagtgtggacgagctatatgtggcaggaggccgcgtcacctcttatgacgcttaaacgtccagctccagataaaagaggcgttaataatgaacactacaaaaaccacttgcgtcaatatgacgatcataaaggctcggtgatcgctgcgcctaaagtatgcgggattctccaccagctcactgtctttgacaaagtggatagatgtactagtgttaccggccgtttcgttgaccatggattgtactatgaaagtcccggcgccaaaagttccattagagccccagcaagtaacgctgccgtttacgtaggttcccggctggcctgtcagcatgtatgtcagttggtgggtataattctgtttaatgttttccatgtcctcgctgtagttgacttttctagtgagaaattgcgtacgatgcggaaggacgatcatcatccctgaggccaaaaagggcgaatcataagctgtcgtgttacaaaaaatagtcaggttagtatcgttgtgctcatagatataagccatttttacttgaggttcataccaccaccctaccctaattgtagttgccaccgtcaccgagtcccatctcccgaaacctaccaccgccaccactaatagcgtcacccccgcacggtacatagttaccctctcgacgtcgccggctgtcaatgacgtgcctgcgtcagtggctatgatttatagcttttggacacaaccgcaacggatctgtcgtaatctaccttccacagggccgccgcgacgatgctgaacgacaggatcagacagacggcgtataggagtcctaggtcggcgtcgacgcggcaggtgcggatgtctcgcagggtgggtagatgggcgatgcacaactccttctccccccgcccgtacattccatcccgtatcagcagccgtagcgtggcattgatggtcagcggggtaaccaaagaaatcacatagggatgtgtacaggaagtgcagtgacgggtatccgtgagatgtaagtcatcaccctcatcaccctcatcatgaaagaccaggactcgggtgagacgacccgatgaatactggatctcccaccacagtctttggtccaacaccgagagggcgcaggagattctaagtctccctgggttgggggagcagatgtaagccccgtgtgtgccccttgccatcaaagccatacacatgagggggagaaggacaagtatccgggaccacccgcacccccacatcacgagaccagagacggagatgtataaaaaaagctacttttattaaacagcattctcaccacacgttaatactgtcacggggaatcactatgtacaagagtccatgtctctctttccagtttttcacttactgagacttgttcctcaggtcctggatggctgcctcgatggccaggctcagggtgtccaggtcttcgggaggggtctcggtgggctgctcaaactgccccacggcgtaggccttcgtggccgtctcgtagataggcagcatgaacccaccctggttggtggagaagatgcgcaccatgacctgtttgggaaacttttgcatcaggggcaggcacaggttgagagcgcccaacaggtccacgggggtggcagcgtggatgatcatgttgcggtaatcggaggaacgggggcataattggtgggtgtgcaattctttgaggctccacgcggccttgacgccttcgttacaagcatcggctgtgcgctgcgccactttgggtggatgtgtcacgggcatggtgtgctccatgaggaagggagtggagagggccaggttgcacatggtgcccaggcgacaccgcaccgcatccacctcactcttcacctcatgattgcgggtgtagataatctggatgcccttgttgttcacctgcatggttttgcaggctttgatggcctcatctaacacctggtgcatactgggaatcgtgaagggcaggttcttgtactcaagagagcgattggtgttgcggaacatgcggctcacctcgtcaatcttgacgcgaccccgccgagtctgcacgttgggtgtgcagaagggggtgttcttatctttcatgatattgcgcaccttctcgttgtccaactcggagatgcgtttgctcttcttcttgcggggtccggtgctcgccccgccgctgctctgatggccgcagctcagcagagaggaggaggccgcgccaccaaaaccgccgcgcccatggtggctcgaggtcacggatgctcctccgccactgctgcatttcatctcctcggactcactctccgagtccgaagccgaactgcaggaggaagacgaagaggaactatcttcatcgggccggcccaagggatcgggaagaggagggtggttcatctgggagagcgggtgcgtgggagaggtcactcgcggcgtgccgctgccggtggaaggggaagacgcggtagcaccgcgggtttcgacttcttcaccctgttcttcctcgctatcagagatcacgatacagccggcggtatcgataatcttgttgcggtactggatggtaaagtcgggctcgggcttgatgtcttcctgtttgatgaggggcagcatgataggcgcgggaggcacgggcggtttaataatcaccttgaaaggacgcgtggttttgcgcggtttcttacgcgggctgagctcgggagtagcggatgccccggggagaggagtgttagtaaccgcgacgctggtgggggtcggcttgttaagaggggcgctgctaacgctgcaagagtgggttgtcagcgtggggccggtgctactggaatcgataccggcatgattgacagcctgggcgaggatgtcacctgatggtgataagaagacacgggagacttagtacggtttcacaggcgtgacacgtttattgagtaggattacagagtataacatagagtataatatagagtatacaatagtgacgtgggatccataacagtaactgatatatatatacaatagtttactggtcagccttgcttctagtcaccatagggtgggtgctcttgcctccagaggcggtgggttcctcagcaccatcctcctcttcctctggggcaacttcctctatctcagacactggctcagacttgacagacacagtgtcctcccgctcctcctgagcaccctcctcctcttcctcatcactctgctcactttcttcctgatcactgttctcagccacaattactgaggacagagggatagtcgcgggtacaggggactctgggggtgacaccagagaatcagaggagctggcaccagcggtggccaaagtgtaggctacaatagcctcttcctcatctgactcctcggcgatggcccgtaggtcatccacactaggagagcagactctcagaggatcggcccccagaatgtactgggcaaagaccttcatgcagatctcctcaatgcggcgcttcattacactgataacctcaggcttggttatcagaggccgcttggccagcatcacactagtctcctctaagacatagcagcacagcacccgacagaactcacttaagagagagatgcccccgtacatggtcatcatacaagcgtcactagtgaccttgtactcattacacattgtttccacacatgtagtgaggatatccataaatatgtgatcaatgtgcgtgagcaccttgtctctctcctcatccaaaatcttaaatattttctgggcataagccataatctcatcaggggagcactgaggcaagttctgcaatgccgccatggcctgactgcagccattggtggtcttagggaaggctgagttcttggtaaagaactctatattcctgtagcacatatacatcatctttctcctaagttcatcctttttagcacgggccttagcctgcagtgcaccccccaacttgttagcggcgcccttgctcacatcatgcagctccttaatacaagccatccacatctcccgcttatcctcaggtacaatgtagttctcatacatgctctgcatagttagcccaatacacttcatctcctcgaaaggctcatgaaccttatctaagatatctaaggcattctgcaaacatcctcccatcatattaaaggcgccagtgaatttctcttccgtctgggtatattttttcagcatgtgctccttgattctatgccgcaccatgtccactcgaaccttaatctgtttgactgtagaggaggataacaacacatataagtatccgtcctcctgactcatttatcgctatctcgatgccccgctcacatgcaagagttaatctttactctatctgacatacacaagtaaatccacgtcccatgcaggttagtatacatcacatacatgtcaacagacttaccgagttctgccaggacatctttctcggggttctcgttgcaatcctcggtcactcgttcaaaagttttgagggattcttcggccaactctggaaacagcgggtctcccagactcagctgactgttaacctccttcctcaacatagtctgcaggaacgtcgtggccttggtcacgggtgtctcgggcctaaacacatgagaaatagagtcataagcacatgggtcacatacaggagatatgtatataacattaatacaattttataaaaaaaagggggggcacaaaccccgacacgtaccgtggcaccttggaggaagggccctcgtcaggattatcagggtccatctttctcttggcagaggactccatcgtgtcaaggacggtgactgcagaaaagacccatggaaaggaacagtctgttagtctgtcagctattatgtctggtggcgcgcgcggcagcaacgagtactgctcagactacactgccctccaccgttaacagcaccgcaacgggagttacctctgactcttatcagaatacaacaactcagctgcctgcatcttcttctgccgctgccttaagtcttccatctgcgtcagcggtgcgagcccaatctccgagctcattttcagacacataccctaccgccacggccttgtgcggcacactggtggtggtgggcattgtgctgtgcctaagtctggcctccactgttaggagcaaggagctgccgagcgaccatgagccgctggaggcatgggaccagggctcggatgtggaagctccgccgctaccggagaagagcccatgtccggaacacgtacccgagattcgcgtggagatcccacgctatgtttaataaaaactgcgggcacgggggacggcgttgttgtatatgtgaatttgtaaataataaatgggaccccatcctgtaaaaatacagagtccgtgtcagtctctgaaggacagagtattggcatatagccaatagagatagttgtggcaaagagccatgttatggattagtaatggaaagtatcgtcaccaataggggagtggtcaataatggtcaataacccacacctataggctaagctataccatcacctatagcataaggaagcgggggtgtataggccccaagccaaaaacagtatagcatgcataagagccaaaggggtgtgcctatagagtctataggcggtacttacgtcactcttggcacggggaatccgcgttccaatgcaccgttcccggccgcggaggctggatcggtcccggtgtcttctatggaggtcaaaacagcgtggatggcgtctccaggcgatctgacggttcactaaacgagctctgcttatatagacctcccaccgtacacgcctaccgcccatttgcgtcaacggggcggggttattacgacattttggaaagtcccgttgattttggtgccaaaacaaactcccattgacgtcaatggggtggagacttggaaatccccgtgagtcaaaccgctatccacgcccattggtgtactgccaaaaccgcatcaccatggtaatagcgatgactaatacgtagatgtactgccaagtaggaaagtcccgtaaggtcatgtactgggcataatgccaggcgggccatttaccgtcattgacgtcaatagggggcggacttggcatatgatacacttgatgtactgccaagtgggcagtttaccgtaaatactccacccattgacgtcaatggaaagtccctattggcgttactatgggaacatacgtcattattgacgtcaatgggcgggggtcgttgggcggtcagccaggcgggccatttaccgtaagttatgtaacgcggaactccatatatgggctatgaactaatgaccccgtaattgattactattaataactagtcaataatcaatgtcaacatggcggtcatattggacatgagccaatataaatgtacatattatgatatagatacaacgtatgcaatggccaatagccaatattgatttatgctatataaccaatgactaatatggctaattgccaatattgattcaatgtatagatcgatatgcattggccatgtgccagcttgatgtcgcctctatcggcgatatagcctcatatcgtctgtcacctatatcgaaactgcgatatttgcgacacacagaatcgcccaagtcgccaaagtcgtctatcgccatcccccgtaaacgatataagcgctatcgccagatatcgcgtatgcccaaaaatcacttttggaaaaatggcgatatcagttacacagaaactcacatcggcgacattttcaatatgccatattttcaaatatcgatttttccaatatcgccatctctatcggcgataaacaccactatcgcgcgacatgaatttagtcggcgacagaaatctcaaaacgcgtatttcggacaaacacacattttattattcactgcagcatatagcccattttagcgcggcacacatccagccgtttgtgtttcttaacgctctccaggtactgatccaggcccacgatccgggttatcttgtcgtattccaggttgatccatcgatagggaacgctgccagcggcgcccagcaggtactgcgccttgtcgttcactttgccgcagcgtattcgcccgtcagcttcgagatataacctacaacacggaggggaaggggggtacaaaacgtgaaattagacttttttttaatgatgttttgtccctctctgtcttactctcccataggctgtaaggccctcgaggaagagacttacggattgtagttgcagctcgtcagtttgttgtgtacgacctggcgtgtcaatgaatgggtcatggtggtgacgatcccgcgaatctcagccgttttctcgggactgtagcagacttcgccgtccggacaccgcagcctgtggattcatgaaaatctactctggcattcccgaggatcgtcgatggaacatggctatcagaaacgtcgagagacagatccagacgcaccacagaacgcagacaatcatgaaaatacgtacgcgacggtgaagcgattgcacattttgaaatcgtaacagcgttccggcgggtggttgacgtttatgaattcgcaacattcttctgcgcgcacccgcggcacgcggctgtgacccaatagcagccacaacgccgtcaagaacggcgtcaggtttttgggactcatgacgcgcggttttcaaaattccctgcgcgcgcgacgggctcaaacgatgagattgggatgggtgcagaaggtgtaaaagtctggttattggcctcggtgaacgtcaatcgcacctgaaaagacacgctgtagtcccggaagacgtgagcccagctctccagcttcatcacacacatctgataacgtgtgccatcgttgacgacgaagcgtagcagcttggtctgcttgggcaccatgtgcgctccaaaaatcttggcgtcttccacgctgatctgcacgtttccgtcgctcggtttcgaagccgttcggggcatccgttgaaggatggtctggttgcgaccgctcaggtaccagatcacctttttcacccaggtggagcttctctccaccaaggtctggccttcccggttatacagcagatacagggtctcgttgcgacactcgggacccgttaatacccgctggaaccccgagaattgcaagggggaccgtgggggcgagggatagagaaaaggacagtaaaacgtcgccgcgtcatgcggtttggaatacgtcagtttagaccatggcggggacggattctggtttgccgttagcgtcgaccagggagacgccagacagggcgttgcccaaaccgcgcacagaagcaggcagtgaaagtggtgacgaagcagaagccgcagcatattatttcccgtgacgcaggctagttggcaaagagccgcacgctgaactcgaggctccgggcgtgtggcgccagcgaaccggcggcgttgaacgtggtccttttgttggtgccgccgcgacggttctgacgtctaaagtcgctgatgagcaacgacacctcggtcacgttgattctgcaagcacaggttccaaacgtcatttcataccccatgcggttacttagccgttacccgttcgctcttaccttcccgttgtcatgcacctttagcgcgtaccctcacctcttgagcacgtcaaagttgtccaagccgtggctcgcatcgtagtggtagttcaacgtgaggtccacgagctgttccacatacttgtaacgggtttggtcgggcagcgcgcgagagcacgcgtcccagtaatgcggtactcggtaataatcgtttttttccgcggtttcccgctggcactgacccagcaccacggcgcacagacaaacagacagccacacccgacacagccgcatgttgcagactgagaaagaaagctttattatgagacatcatacacatagtataggcgaggtgatggggcggggaaagagttggaaccgaaagacaaaaaaaaaagcctagtcgtactcgggatctctgagcgagacgggttgcatggcaactttcattagtttgggaatctgccagctggtgctgttcgaaggttcttccatttccgaggcggtcagttcatcgtacaccgaaacgtagtacctgatggggtcctcctcattgtccgagaggtgagattcgatggtcaaaggcgagcctctcccataattgggattcacgaacgacgtgtccaagttgccatcctttctgaaatagatgacgttctcaggatcatgtttcatgcgctcgcgggccgcggacgcctcctcctcctcgtcccagtcccgagtttccaaccgctgataagggctcgaggaacaaaatccggcggggatctgagaacctcgtcgggaaccgctgccaaacgggctgctgccgccactgtcgtccgtgtcgtccaacaggttgacggcctcttcgtcggcgaaacgaaagcggcccgggtgcttgcaacacgaggagtaaactaccgcgatcagtaccgctatgaagctgaaaatggaggtgcctgtcacgatgtagaagaggatagccagcactttcatgatttcgtcattgcgcgcgtcgtgaacggaagattcgcgggcggtggtcatgttggtttcggttgtaggttcgctactcgtggtgctctcgacggtatttctgctgctggtgctagtagggacgtttgtgctgctggtcatatttgtagcgtcgctgaagtcgatgtgaagcagcaacccgaacgcgaccaggaccaggaatgttgcgcgaaggagaccccgcggggccggcattcttgagacgtggcgacgtggatttctcgttatgtccgcgaacgacgtgtgacgaggacgtggtttccgcaagcctctaccgacgccgcgacaccaggtaggttatcaaaacgcgagcccatatcgccgccatcattgtaatcagcaatgtgttgaggtactgcacgatgaatctgtctagtgacaccagccaaccctctgcttttgcgggcaagcgcgctttcggtgacagggtgtatcgtacgtagccgcgggtcaggcgcgcgttgtagcggtacacgcagaaatctatccacaggccaacgcccggctgtagcttaggatggtggataatagcgcggtgacgtacgccacggggctttagaatctccacctgtaaggccatctcctccaggtagtgggtctgactgcgacgcagcgtccagttcatgtaaaagtcggtctcgccgtgtccggccacgtagaggctgcttactaaatcgggcgccagagctagatcaggcgtatcaaattccactgccaggcgacctgattctaacggttccacgatccgggagagcgtttctagatatagagcaaagcgtaccacgtctacctgcggtgtaaaaaactgttgtgggcgttcaccgtcgttgaccacgtaagccacgtagaggccaacattttccaccacgggttctagctgcaggcggcacgtaaagcttagaaacgacggctgtacggtttggttcccgtgaagctgaagcgtcacttccttgccggggctcaccgtgctgtaacgccgcaccgagtcggtcatctgctccagatcggtagaccagaagggcgtgcaatgcatactgtcccagtcgcgacacgcagcccagcctagctcggtgaagggtcgacgcacacccgaaaaagtgtgcttgaagaccagggggtcgcctcggtagctcagtagccgaacatgcacatagtcgcggctagcgttgacagacggcccgtagagggccagcaggacaagcgtgaacagcaagcgcaacatgctgcgcgggttagaaaatgcggcgtgccggccaccgcccgactcataaacgctaccagcatgacgtctcagatcacacaagtgacgaggagcgtaccgcaaatcactagggaaaaggccagcagagcccgatagtcttgctcttcgcgaacgatctcgtccggttcctcgcagtcttcgtggtccacagaagatgaggagcaggattcttcgttaatttctgccaggatactagtgctgtaccacaccagagcgctcagcgtgcccagggctaccgcacggtaaaatagggacatgatcaccagcgcaatctgaagtggtggtagttcagtttcttggcgtatttccagagaaaggctttgtaggccgtagggactggccaggcaccgaactcaatattggtagacactacgtcgtaaatgcgttgttcctcgtctaagattaaccgaaaaaatagccggttgatgtgacgacgcacggcttgcgcgttaggattgagacacttggtgcccttgtcctttaaaatagccagcacttcctgacgattgcagctttcgctcgccgcgattggcttaagcaattcagttccgattggcagagtattcaacagaatttggttgttacaacgacagcgtttgtcgtaatcttccaattctaaaagatggacggctaggggacatacgacaaataacatgtatgcagtcaattgcatatatcgtaccgataaaatgttagtgtgcggattcagaatcggatgatgcaaccgtcttagcatcatatcgaaaaagtatacatattaccgattcattataattagggaattatttccaacgcggacgtttgttagtgacagcgttttcttctacatgcggtccattactatcctttacttttaccaatactctgtgccatgagttgtcttttttaccatccagccatttggacaaatgatgatcgggagctaaacatacaggtttacctcgaggaggcaatagataatgttgaggtttgtcacactcaggaggattgggagggtcacgaccaacccaaaataagccacctataggatgatgtaaagctttgtgggtacacggacaacgcaattctctactgtgaaccccatggtaatacataaatgccatcaaaagactaatcagcgaaccaaaaattaatcgcattctaattttattaactacgtcactatcagtaattcgtaatatccggtattcccggaaaatcactcaaaactgcgtccatgacacatcaattcccgataagtacccccctttgaaatcggatccccccacataccaatcaatcacacaacacacaggtttaaaaatcgatcacacgtcaattaggtttcaaaatcgatactgtttattatcaggaatctagactaattctacaatgacagctctgaatttctctctcgtctttcttgtcaggttctcatcatcaatcttcacttccacccatcgaggagtcatcgtcgctccaaaaccctttggggtcgctggttggaaaagtctctgacacgatccaggcaccccgtacccagtccgactgatctagcttacggagcatctcaacaggcatgagctgcagggccacggctgtcacggcagggattattactaccgttcaggtaaactgtatctccctgagttaccgtgatgggtctttctacatgttgactttgcgtaaaaaatcgccggtaaaatgttttttcttgttcatgtaaaagtaccggaactaaaatgctagttagaatggttgcagttgctattagcgcggctagtaacagtagtttagtgttacattgtatacccatgtttttaataactatgaatattctgcttcacaccataagtgcttaacccacaaaaaccacacggagacattattggctaaaaataaaaacaaaagtttattgatgtgcatgttaggttttagtctaaaattcatctgggtcgtatttgggaagttttgtataacgcggtcttctggggacgcgacggctacccatgtataaggctataagtgccacagataccactatacccgcccatacagcatgaattcccaggggaatgttagtgttttttacagtttttattacattgtcccacgttctgctattatgctggtctgattcctcttttgttttacatttatcaggtataggagacgatgttgcagttcctgataacacggttaaatagtagttttcctttttaccgtcactgtaacgttgcaaaacgtattttccagcgtgttcggtagttacgttgtatatagtgagagaggtcttattgcagtctaaacacatgccgttcagtggggaagttgaataataatgtccaatgctgcacagttggtgtgcgcgaggtccatattttatccattctatatcgtgccatacatccgttctactgcagtttttcaaagtgacgtatccaccgacatatcctgttacattaattacttcgtaatttaaattagagtgtttataaacggtgtacaaactgccattgcaagttatgttgctggtattcaaccagggagtagtactatgaatggtagaaaacgttaatgttggcgtagcgcttgacgatgattttgaaagcgttgaagtggttgctgatgcgactgaagaagcggtagagggtttgtgcgtggttccatttgcgatagctgaagtgctgttagcatcggtgacagagttagaagaatttgtgatagtggaggcggtggaggtaaaggcaattgcacggacaggagcacgtgtcattgcaaccttcagatatcgtaatcatcagtaacgtccacttaaccgtaaatctccagtccataacgttattaaatttcggttaacgggcattgatgtttcttcggacgttgttgatctttcttgcccgtttattttctgatatggtctcataagacatttatccggaaacgttgcttagtcctcgtgctcaggattgtatcgaactatgaattctgattcacttatatcgtcacttaatggatgatattttttatttagagctcgtcggacgaaaaataggagaatgcaggctacacaaattaatgctaacgtccacgtagtgcgtctgccgtgtgatgtgttagaatgattgttatagcggtataaatgatctatagatgatgtggctgtattgtcttcataattggtcggtttatgagaagtgtcccattcgtgctttggttcttcacatacccagggattcacgtgtgtcccgtttgtgttgtttctaggatgtatttgcagattaaagttttgattttgttcggagggatgcccagttttataacatcgaaagctatatttaccagaatgagtaaaattaagaccgtacagagataaagataaattacgatcgcatgtaaaacataaatcatagtgatgttttagataatttgtgtgccactcacatagtatacgcgaatggaggattttcaatgaatggttatgatattttccatttcttatgttgggatgggtgtattttccgtgtgtggatatattaaaatgtctaagccaggctgttttgtagcacgatgtgatggttaggttgtgtgttatagtaatattgtctccttgtgccgcctccaataatgtttcagattcttttgatatcgtattatttgtactgttaggcgatgagcaagttggaagcggtgtagtgacgttttcatttgcatttatcatagtagtagtgttggttgataatgatatagtttgcaaagtcacagtactatcggttacatgctgtgtcgatgaattcgtgtcgccgtttggtgaagttgttattacagttacgttagttgtagatgtttgggtagatatggtggaaatagttgaggtcacgtctgtgccttttacagagcttgcagtgaatcctgtggatgtgttgacgttgccattggaggatgtgaacatagtggtagacatttcggtggtttgtaacgtagatgtcagttgtgtagtagatattaagcttgtgggtgtaatcgacgtggaagtattggcgatagtggtgttgttacacttgcttttctgcagaatccaaaaaataataaacatgcatattatttgcgtatatgatgacttgttccaccgtcgatgttgtgtgcgcatcttttactccaaatccccgtccaccgtcaacaacagaggttccgtatctaggtccgtccgcaaccgttcagcgtcctgttccccgattcgttgcgaccgcagaaagcagatgaccagtgcgccaacaaagatcatcagtcccgaaacccaggcgcaatggagtgagaggccggaccactggcgttttaaatccgagataattgctcggtctgcctcttgggaatccgtaaccacaactctccctggtcccggataaaagcatcgacgcgtttccaaagctcggcagaagctacgtgggtggatgatgaggtaaaaagcctcgacatcaccggtatactgatcctgcaggaggtagactcccgtatctttaaccgtaagattgtacagcgtgagattttggcgcgtgcacgtgaaagttgcgccaccctgatgcgtggtttctttataggcgtctgtaatgatgcaaagtggcggcatacgacgcatgtatctgctgtagatatcataacgttgccagactacgctgtgatggctagtgttaagcctggtaaccagagtacgtgtacggtcctcgcaggtggcgcggtaattggcgagctttaggggttttttggttggttcgacggcgttcgatgaacttccctgagttgtgaacaaaaacagcgacgtgactatgacaagcgtgaggggggtgctgtaggtctgcatggtgcaaaacacgttctcgccttccttgtcagacgtcgtcgtcctcgtcctcttcgtcgtctgtgcccgtcggttcgatcaacggggagttatctttctgtctggagggtcggtatggaatccgttcgtagatgttctgctttttagccgcgtgttgttccagctttttgcgtgtcaggctccgataggccagacattgatctacctcggtgcccgtgttgtttttctcctcctcgcgcgcgtaaattacgaagaagaccaccagcaggactatcagcgtggccacgaacgagcccgcgccccaggccgagtatgcgcctagcattgtaatgggttctgtgacccggcatttgcacatcgcgtggcacctgctgccattggtagatgtgctattcggattgcacttacatgttaggtgggtattttctgttttcacgagacaattggtggtaaccgtgttttcggcgcaaacggccacgtagcttatcaaaccgagtgctaaaaagcacaccgcgtgcattacacgcggatacatattaaaacaccgtgttccacaagcaccgcacacgtcgatcctccccgcacggtcttcagcccgcccatgacatgatctccctcacgttacccttcaacactctgtagtactctgtctcggcttccggtccccatgtcctaatcataacaaaacaccgtgtcactgtccatctccctgtcttttcgcgccgccggtcccccccaaaccatgtctctagatgccgccagccaccaaccggcggcacggcggctcttggattcggcattggtgcgccgcgtcttggcctgcatgatcatcgtcatcatgatcgccattagcatctggatcctgacctacgtgctgtttttctaataagaaccccggcccctgacggtaattttcctttcttctccgtttctcctcagctgccgtacgtgatgcctcacggccatctccgacaggccctctccccgacctcctggacatgtgagggcttgttgctcctcctgggattgctggtgctcttctttcaccaccacaaccagtcggccgtagagaggcgtcgccgcgtctcgttcgtcgaggtcgatcgactgccgcatgagagcggatggtattcttccgatgacgacggagaccgggatggcgatgaggaaactggagagagccacaacagaaacagcgtgggactgtccgctgtttttagctgagactggcgtgcgacctgtaaaccgttactcgggtctcaagatggtttggaagttgtgactcatcttcctgtgggcaatgcccaaccggacgcgagtgtcccataaaagccgggcgctccggcgagaccatgccatcctcgccttcggacgccccgctcctcttctctctcctctcctccccgctgccgcggccactgccgccgccgcccataccatcggcatgtcggccgacaaatcgcagctgtcgtcgtcgccgccgcagctgtagcagttaacgtcgccggccttcaggaggagatggcgctctgcgtcgtctcttcgtcccgcctccctctgtggtcgtgggtggtgcgagagtacacgatgggtggctctcgtctcgggggaccacagggggaggggggtaatttattattcgtattactgtaattttgtatcgcttaatttgtttagagccgcacgcttgacaacgccttgtatagccttatttatcccgatgacttttttctccgtacaagaaatggacgtcacttgagcagacacagtttcatcgaccacgacagtctcatgatctgactacctctgacccgccaatgagaaaaccgaaaagtaaaagatgaccgcgccctcggagtccttttttccttttcaatcatgaaagcaagaggcagccgagagaatgccagtaagagacgaccatcgcagacacagtacgatactcatcttagaacgaaccagcgaataaccatcacacgtacagcagaatctcatgaactagtcaaccaacgtcataaaatcttcacacaatcgtttttgcgaacttttaggaaccagcaagtcaacaaaagactaacaaagaaaaaccatcttggaattaaaaaaagtagcatcgttaccttatgaaccagcagcattcagtatatacaccagatataatatatttattaatgtatcctctctttctcctgatgtaattttgtttttgtaaattcaattgttgaaagtctctccctgggggaattgcatatcttattgatgaagaagaaatccctgccatatgtgttgtcaaactatcattatttctctatatgggtattttttttctaagaagcaaaagactagcagcagccaaaataaacctgatgaaatctttaactgaactcccggtggtctgtgtgtatatttctgttggtggtcggttgtctgaacccgggtgggttgttcggaaacggcgggacggggaaacgggtggaaacagcgtcgctatatacgtgacttttgatctaaacggacgtcgctaggctgacagtttacgaattgctaaacaaggtggtcaggaacacaacaagcggggctttgcctggtaggatttcctgtggaaacaatcaccggatgttatcgtggctggtacataagctggttctggctgcaagcgctttttactgcattaggttcggcgttagctcttgcttaggaacgccatggctataacgggaaataaccggtttggcagcattccattgtgggggggggggtacttatagcgtgtttcatgacggtgtttatacatgaaggtgcgggtttcaataaagtagaggttaaaagtggtgacaatgtaaccattgaacacaaaaacgacccgatgactacgaaatggagccatctgaatcaaggatggttatgtaatgtaacagggagacatgcacctctagtgaataatggatcaagcgtttgtgtaacgaattgtactcatacatctttagatctgtgcaatatcacgaagggtaacgatggcgttgtcgaccttggtcgttggttcggagagaataaagacgagtacagcggtgaattatggtatttgactactaaaaattaggtttagagagtgttaggttacgttgacctagttagatttcctgtgtagaacaatgaccggacgtgcttggactggtacatacgcaggggctggacgtggttaccggtcactggactcggtttcgctgtagctgtggttcaacctgaacatggctcccagagctgctaggaaccggtccagtcacattttttggtgggtggggggtactaaaaaagtgtttaatattggggtttaatgataaaatccaggttatggatatgaggaaactgaatacctcgcagggtcgaaatcttaccacagttgatgatagaagacggttttccatcgggtgggaaacatgggatgacggtggagagtctctatacgatgtgactaataatggtacaacggtcatcaatacaacagcctgtgtttcaagttgttcgcatacgtcgcttgtgctttgcaatatgacgcagcagactgattcgttgtacggagtgggtcatcggttgaatgacgaagaagatggtgaactgtggagagtttcggtttcttaataatcccatacgacatgtgttcatttatatctgaattttaggatgatgactatagtataactctggggaacaaatatcatacgttaatcactttaagttacgccgttaggaaaagaaaatcagtccgaatgaagcatagtcagccgaatgatacagcaatagcttgtttacaacgtgttcttttttacattatgaacgtgccttgctttttatacacacatggagacagaggtccctcagcccttgtcacgacaactccctttttctaaaccgtatgtgctccaaaccgcatctcctcatcgtcacgtgaaataccatgggaccccttttcgtcacacacgtctttccgcttactcaacgcgtcagcccgcgctcggcagagctaccatataaaaacgcaggggtttagcggcttccccagatcgctgctgccccggcgttctccagaagccccggcgggcgaatcggccggctggtcggtcggcgctcggacggatggggagaacggcggtgacttagccgcccgtggccgggagaagatggaggagccgagatgacaacggcagtcgtggaagggtcgccaagccccggtccttctcttctgtctggtcgaatctcgttttcttttttcaaccgctctttttatcacctttttatgtgagtttctcttccgcgtctcccggccgtaccatccacccatgcagcatgcacgcgtgtatgtatgcatcgtctctcctccgtcccgactaccatcagcagcaccactaccgccacccccagcgccaccaccgctgccgtcgccaccgcgttatccgttcctcgtaggctggtcctggggaacgggtcggcggccggtcggcttctgttttattatttttttttattttttatcttctcctttccttaatctcggattatcatttccctctcctacctaccacgaatcgcagatgataaacaagagggtaaaaagaaaaaagctacagacatttgggtacctcagctttccgataactcgaagaattcaaagtcgacgattcccaacgagagaaaacagaacaaaaacaaggtcatttttatttatcctcatcgtcaacaacaactaccgacaacaacgaaacaccaccaagaatgtcaatccgcaagggtgttcctgccccctcgacgcgcctgtcgcgatcctcatggcgaggaccgcgatctccgtataggtagatgaaattatcccgtgtccggtcctgattccccgcatgccctgcacatcctgacgcgtcggtcagcagccaaacaatcataggaaatgaaccagaagaacaaaaagatcatctctctcggtgtatagcaacaccaacaacaaccgcatcgcaacatcttcatccgcaagacggaaagaaaacaacaataatgagaatgaaatcaccacaaccaagccagatttcacgtccatgagtttttattatattattatcaaaacgaaaaacagaaaaactgtcatagataaatataaaaaaaaatagaaaccacaaacgactactagtactccaatcttagatgtatatgctcctagataagatttagtattaccataatcatcgaagaatgaaagacgacgatgattccttaccgctcctgccacccggtctgtatgtagagagagaagagagaaaacggtgaatccaagatccccgggtcggcgtcggcatgccgctgatcgcagtggccccacctcggcatgccggcgccgggcgaggaattgctcatgaaaaaagtatctttctgtaaaaaaagaaaacaatacatgattaaccgaaaagaaaccaacaaaaagaacccgagatcagtcgatttcgatcactacgataaacacatggaagatttcttgaaaaaagaaaagagaaagagaccaccttcccggcggcggacacgctcctctccgtcgccgttctgcaccatgattcgatcaataacaacatcatcatcggagaccatcttttaatcaatcagcgttgcagtagtcgactccctggacacgaaggagtcatccatttttatcctcgcacttcttcgctctcaaagccgcctttaaagttgaaatgaaaggatggaaacatggaatacagttttaattgcacgtatcaccattttactacaaaaagaaaaaaaaacaacttacacatagtattaccttaggtttacggataagtagagtgtaggcgtttttgaaacagttcagccaatgcaatcttgtctcggcataatcactctttctgcatataatagtagtagtagatttattcacatcaacacagcgaaaaactccagcatcaaagtacacctagagacagcccttaaaatatagtttgcagcttttagatgtacttacaccaaagaagattaccgtccttacgagaaaacagatactcggatataggaatcaagacagctctgcactgaaaacacactctcctgtcacgacaccgcgccacaccagaggcgtacgcgtgacttcatcgcaacgatccatcgtgatgtccctcgcagaacctaaaaagaccaaaaaaaaatcttggaccacagttgtcgattcttgaagacaatattctcgtgagaactttgagattcgcacttgaaacctcttaggatccacaaaaacaacaacctctgtatggaaaatgcgctattttatctcagcttttctcccaaacctcggtttcttcctattcttaagttttccctagtatatttgcctccttataacaaaagaagcacaagctcggtcgcacggattattccttctgctaatctattattttgttccttttttttttgtttgccttcacccccttcactccctgtagcaacacagagtagtagacacaataaatgagaagtttgcatgcatttgccgtgtccgtggtctgttatagcgtgtggagtgctcgggatggatggacgtggggacggattcctgaggctacaaagatacgcggagacgtcgtggcgaggggatgggtttattggatatcggtgaagcagcgtggcggcgaaatacgcgatccctgggctggtagatccccctaccccgtctaccggggacgtttatccttgggacatgtaaatgtttcggccggcatccacgcgccacgttcaccgcgtcgtgcccagcgccatgtgcgggtcgtttcggcgtgaagttggacggcgtggtttcggggattgtgaaccgtggctgagggtgtagaagggataggaaagagcgtgtcatgtgggcgagtcgtagcatgtgggtgcgatgcggtggatatggtgggctggggtggttttgggcgtggagatgtggagatgggggtgatccggatgcgtggcaataggcctcgagcttgggcttctcccgcggatggacgttctaactgtacacggcggccgtggcctccgagtaaaaaaaccaggtgctgacgccagacacagacgccgtcctcggaatcgtgtgcgcgaaagcctgtgccgcggcagcgtacgacgttccagtcagcgaggccgtcgcgttggcgcgccaacagtaaggtcacgataggttggcggcccatggttccgaagcgtccccacatgcaccagcagtcggcgtcgaagtcgcttgcgctgtcggcccggtcgccaccgccgcggcggatttccgcgcgggggacggggtagccgagcgctgcgccttcgccaatgttgtgaagtagatgcgtcagttgatggtgatgttctgtggaaaaatgagcgctttcctgagggttggcgtcggggtatgcgtgtagttggggttgtgttggagcgtagaggtgttggcgggcctgcgcgcaagcggcgtaatccgcggcgtcgagctccatctgcgtgcggtgttcttcgttggcgtgtttgtccgaggtttggataggcggttgtgtgttgctgtggtgtaagggtagcgtgtgttggtactgtgggtgaagcggcgtggtgtgggtgctgtttgtggctgtggctggcatgattgtgcggcaggtgtgtgttgaagtgggtggaggttaaataggcgagggcgagtccccgtccccgcacacccgcgtcctcgccgcaaacacccgcgccacccccgtccctcggtccggacccgcaacacccgcgtcgccaacgtaacccccgtacccgcaacgccccggccctaccgccgtcacgcacaccccccggcccgcagcccggtacccagcgcgcccaaaaagcgccgtggagacacccgtacagagatccctcagcgcgatgacgccccgcaaacctcacgcagtccggtcccgcgaacagataccgtgggacgacacgcaccggtagtgcgcacaaaggcagccgcgcttacgggcctcaaagttccctcagccccgtcccgcgccggcgtcgggttgggtgtgccgggggcgcggctgggtgggtgcgtgcgtgccgggtgtgtcgcgggcgtgtgtcgggtgtgtcggtcgggtgtgtcggtcgggtgtgtcggtcgggtgtgtcggtcgggtgtgccgcgggtgtgtcggtcgggtgtgtcgcgggcgtgtgtcgggcgcgtggcgggtgtgtcgcgggtgtgtcggtcgggtgtgccgcgggtgtgtcaggggtgtgtcagcggtgtgcgcggcttcggggtgcgtgtcggcggccggagggaacaacaagtgtgccccggggcccgcgagcccccccccctcccctcggccggacgcctcttctgcgtgtgtcctcgacgcgggtcgcgccgtactttgcggccgttgcttcccccgcggtccccagggtcgcgcggcgccgcgcgcttcctcttttccgcgcgcggccgtccccccggggacttcctcttttccgcgtcgtttccgcgtcgctggcccctgggaggcgttcttcgtgtgtccccggggacccgcgctgccgtcgtcccctggggacttcctccgttccccggggaatcaaacagacacagacacgcgtcttcttttcgccgtgcgcgccgcacgccgcttttatgcgccgccgccgtcccaaccgcaccgcaacgcgactccaagactccaaatttcacccccccgctaaaaacacccccccgccccacggggacccaacacacggcccggaatggatgtcaggcgtccacctagatgacagcgctcgagtgctgcgggcctgtctcgcgtcttccttcgggcgtctgcctttcccagtcgagtgcgtcgtcgcctgccgggtggttttccacgggcttccagactgcgcgtcgccaaggcggcgccagcaagcgccgtgcacggcgctgcctataaaagccaggtgcgtgtcggccgtggcacacggacaacggagacgtccgcgtgtgtaaacggcgtgctcgctgacgcgggttgtgttgctatatagtggacgtcgcctcgacgtcggaggtgtccggcggccatggcccagcgcaacggcatgtcgccgcgccccccgcccctcggtcgcggccgcggtgccggagggccttcgggggttgcttcctctccttcttcttgtgtgccgatgggagcgacgtcaacggcgggaactggtgcaagtactgcgggttcggcgacgccgggccacggcgtccaacgggtagaaccccgcgggccgccgggcgcccctccgggtagcggcaacaatagcaacttttggcacgggccggagcgcctgttgctgtctcagattccggtggagcggcaggcgctgacggaactggaataccaggccatgggcgccgtgtggcgcgcggcgtttctggccaacagcacgggccgcgccatgcgcaagtggtcgcagcgcgacgcgggcacgctgctgccgctcggacggccgtacggattctacgcgcgggtgacgccgcgcagccagatgaacggcgtgggcgcgacggacctgcgtcagctgtcgccgcgggacgcgtggatcgtgctggtggcgaccgtggtgcacgaggtagaccccgcggccgacccgacggtgggcgacaaggccggccatcccgagggtctgtgcgcgcaggacggactgtacctggcgctgggcgccggattccgcgtgttcgtgtacgacctggcgaacaacacgctgatcctggcggcgcgcgacgcggacgagtggtttcggcacggcgcgggcgaggtggtgcgggtgtaccgctgcaaccggctgggcgtgggcaccccgcgcgcgacgctgctgcctcagccggcgcttcgacagaccttgctgcgcgccgaggaggcgacggcgctcggacgggagctgcgccggcggtgggccggcacgacggtggcgctgcagacgccgggcaggcgactgcagccgatggtactgctgggcgcgtggcaggagctggcgcagtacgagccgttcgcgtcggcgccgcaccccgcgtcgctgctgacggccgtgcgtcggcacctgaaccagcgtctgtgctgcggctggctggcgctgggcgcggtgctgcccgcgcggtggctgggctgcgcggcggggccggcgacgatgacggcggggacgacggcgatggcgacggggacgacgttgccggcgggggcgagcggcacggagacggaggccgccggcggggacgcgccgtgcgcgatagcgggagccgtggggtctgctgtgactttacctccgcagccgtacggcgccgccggcgggagcgcggtttgcgtaccaaacgcggacacgcacgcggtggtcggaacggatgcggcggcggcggcagcggcggcgccgacggtgatggtgggtccgacggcgatggcgggtccggcggcgtcggggaccgtgccgcgcgccatgctggtggtggtgctggacgagctgggcgccgtgttcgggtactgcccgctggacgggcacgtgtacccgctggcggcggagctgtcgcactttctgcgcgcgggcgtgctgggcgcgctggcgctggggcgcgagtcggcgcccgccgccgaggccgcgcggcggctgctgcccgagctggaccgcgagcagtgggagcggccgcgctgggacgcgctgcacctgcacccgcgcgccgcgctgtgggcgcgcgagccgcacgggcagtgggagttcatgtttcgcgaacaacgcggtgaccccataaatgatcccgtcgcatttcgtgtttcggacgctcgaactctcggtctcgacctcaccaccgtcatgacagagcgtcaaagtcaattgcccgaaaagtatatcggtttctatcagattaggaaacctccttggctcatggaacaacctccacccccatctcgccaaaccaaaccggacgctgcaacgatgcccccaccgctcagtgctcaggcaagcgtcagctacgcgctccgatacgatgacgagtcctggcgcccgctcagcacagttgacgaccacaaagcctggttggatctcgacgaatcacattgggtcctcggggacagccgacccgacgatataaaacaacgcagactgctgaaggccactcaacgacgaggcgccgaaatcgacagacccatgcctgtcgtgcctgaagaatgttacgaccaacgcttcactaccgaaggccaccaggtcatcccgttgtgcaagcttatcgcgataccgtcgacctcgagggggggcccggtacccagcttttgttccctttagtgagggtta

SEQ ID NO: 5 - DNA, 229700 bp, Human cytomegalovirus
gaagctaggcgcgcctgtttaaacatggatccggccgcccttaattaacgtgggagtctgatccaacactgaacgctttcgtcgtgtttttcatgcagcttttacagaccatgacaagcctgacgagagcgttcatcggggcatgaagtacgcattacacaaactccatatatttgttacgatagaatacggaacggaggaggctttcgccacacctatcctgaaagcgttgcattctttatgataggtgtgacgatgtctttaccattcccacggctgctttgcgtgatgatgacattcatcatgtatttccattcacacataccttttgtgcatacggtttatatatgaccatccacgcttataacgaacctaacagtttattagcccttgacaggataggtcaaaagattatatgtaggttttccggtaaaccgaattgtgatatttctctgcaggaaatagaacagcctggtacctataaaacggacaatgcagtactgtagcagcgtaaccaagtaggtccacatgaacacgtacaaaattatggtaagccatcgtttttcataccacagcctgtagctgtcgtacatgaatgaggacggtcgaggaacccagggtagttgtaattgggggcgacattcgtactgtccagaagacaattgcacgggtttcagtgagatgagtactttagcgatgtcggcgggggcgctacgtttcaccgtgacggtgagaacttgaccgtcgttttgtatttcatgaggcacgttatacaagccactggtatcatgaaggatgacctctgatgcgatgtgaggattaaattgtccctcaaaccgccaaacgctggtcatgttaccaccgtcaattacgcagctgacggtgtgagagaccacgatgttggacttaggtttgggggctaattgccttttcacaaattccctttggtattgcaggtcctgctgccactgcttttccgtgcggaaagtcgccatgtcttccacacgtttagcgacgatacacgccaccagggtggataccagaagcagctggatccgcatggtattaccgtatgtcaattagaaagttgagcggacacggctatcgttcctggcggatataagtatataaacgcaagttagcttttcccgtccgttttgtacacccgttccccacacaaatgacgaatacggccttttttttataaaaataaaccacgtgtattgtataaaaacatttacatagaaaagagacacacggatcaacataaggacttttcacacttttggggtacacaggcgtgccaccgcagatagtaagcgctggatacacggtacacagtcctggccagcacgtatcccaacagcagcaccatcgccatctgtatggcgatcacgaccccgagctctaagtgtctgtattcatagtgtagtcgtcgcaggttatccattgaattcccgtaactgaaataacgtatatggtaccgaggctggcaccacatgggtttgcatttggtgcacggcaccaaatgcagagtgagatggtccaagtccgtgggcacccactggcgcaaacggaatacggcttcggtggtctccacgaggcactccggggcgtgcagacggccccactttcgtccgtgacggcccgaccagccgacccgagccactatccctttctcgggatagaacgtaccctgtacacgccacacagcgtccaacacgccgtccttgacgacgcagctggcctgatagctggacacgttgttaagcggcggaaagcgaaactgacgtgccggcggagccacatagttcggttcaccgtgttgtcgcggttcgtcctccctatagtaatagtagtcgtcgtcctcataggggttgccggcgtgagccagcgttacccaacagcagcccaggccgacgaggaggcgcagccaccgcctcatggcggcttcgccagtcaatcgtctttagcctcttcttcccgtgaggtccttccggtggcgcggtgccgacctcggacccagggacgtatccacctcaggtacacacagcaggctacctggacaccgaagctgaacaaggctacgtgtttcacaaactgcaccagtaccacatagaggaatgtcaggtagcgtctctccgcaaacagccgttccaagtctgagggcgttgcccgcagcggcaaccagggcagcctggacgccggccggcaatggagcacgctccggttacaggcactgcaggggtaaacggttaacatcacgtaagagagtcgtgcgtccacctgtgggagctcagtttcgtaacgtagagccccgtcattttccagctggggtgcgccgaccttgaaatgggtcgcgctccgctcgttaccccaggtgccgtaggctctcggggccgtatcggagaagttgccgcgcacaagccaggcggccacgagtaccccgtgctggacgtaacattcggacacggaactggagacacggtagccggacacgtccccgaacccgcgagggtactggggcagacggacggacttgctatctgacaacggacagataccagacgacgaggacgcagacgactcgtcgctggaccacgacaaccggagcgactccttggagcggctcgagagtacacttactgcgatcagacaccagtgccagaagaaggaacaggtggacggagaccacaggatcatagccgccggcaccgcggccggccgcaggaagccgcccggcgcgtcgtctgtgtgcgggagccgaaacaccgtgcctctttatatcgtcctgacgtgacgcgagtattacgtgtcagggaaaacccccgtcatgacgaacgtgatttgtaagtgacgcggggtgctgacggggttcggcccaagaggtgatggagcgcctcacgtcagtatgatgtccgatccgcgtcagccccgacgtggttgtggtcaccaaaacccacgtttatatggacgttgagagcagcgcctgaccacatgattcatcataccatttctcggaatcgggcccatgccgggaaagcacattccttttcagtaaacaatgacatcataacaaatcattttattcgcgaggtggataataaccgcatatcaggaggagggatcgggtgatgacgcaggccccgcaaaacagtccgaaataaatttttagtatcgccccgtagtcgcctagataccagaggtacgtcaagttcatcaaaacgcccatgggcgtcccggaatcgtataccgggcacacgaagcgttcataacaatcccgggaggcgagtgttagggtagcagaatagtttcggggtcggtttccttccggcgacgacagctccgtaggcagcagaatgtagagcgcctcggtagccgtcgcggtgccttccacgaggatgggctgccggtgcctttcgtgattttccccgtcgtgtagccaagccgaggcccgcaaagtcttaggcgaggggaattgtccatagagtttcaccgcacctttcagtacatgattctgaataacacagccgcacgtaaagtaggtcggttctctcgtctcctctgtggctgccgccaccactcccagccaccacaacaggcaggtcgcgagagggttccggaggcttccccggcgtagcatggtttcgggttaaagcaaaaagtctggtgagtcgtttccgagcgactcgagatgcactccgcttcagtctatatatcaccactggtccgaaaacatccagggaaaatgtcggtgcagccaacctttcacatacagcccccaaaacacttgaatcactgccaccatcatcagcgtatactgcgccgacttaatcgtgagcgcgtagtacgccattagacggcgatcttcgaacaatagtcgttcgatgtcctctaacgagctccacaggggaacccaaggcacaaggcaccggggttcgcactctacataataagtttggcattgatgacagggggaaaagtagaacaacacgagttttgtgcgttggggaacacgatagtcccggagccagtagcgttttgcgacgaggctttcggagatgtcctccaccggcgtcggcactcgatccgcgtagccctccagcgtctggtagtacacccggggtgtcggcgtgggcacggacaggttcccgcgcagggtccacagagcctccagtcgaccgcccgatcggagcacgcagcgcgcctcggaatactctactcggtactccgaaacatcgggcagaggcggtaacggctccgtctccaccaagggcggaggttcatcgaaaagagtcatggataattcaggcatactacccgcgaccggggcccagagggctagaataagcattacaagattcattctgtcttacaagggaagggtgttcccctgtctagactcaaaagctgtaaggctatcttatagcatgtagtcttgcacgtcacggggaacagggtggtgatctagtgacgtcgggagaacacggtgttttagggtgcgggggacaaaggacagtacgacagattaggtgatagaaacgtttttttttatttatgaaaaagccagtgtgccgtgcggcctagggccccggcgtagtttggataccagatgggggccgtcaggggtactaccacgagcagaaacataatgacttggtccatatatagcagcatagcggtgcgcagcaggtcgccgtccgtgtagcaatttgacggtgagcgataaagcaccgttaatgtgtcgcggatgagcacgatcttgaggccgtagatgaagctcacagtcagtgctaaaatgatgcgttggtatggttcccaggactgcacggcgatgaagagccagagtatgggaagcatgaagcttagcaaacagaggatggctaatcgtcgttgcatgttccaggccatgagccaggctaggcccgtacaccagacgcagagcatggatgacaggacataggcctggattaccacggtgcgatcgaaacacagcccgatggtggacacggatatcgtagtgagggtggtatataccatgaccagcatcagggtcccgggtcggcgctgacgttccagccagtacgcgtggcaacgcagagcacagggtagcagtgtgctccagaagggcagtgtatcgcgcaggtagggggtcgtcacgcgccacggtatgagcatgaaaaggatggtagtggctatggtggcgctggtctggaacacgacggtgccgtagagacgtaccatccagagaaagtgttgaacgctccgcagggtgtcttcatctttggtgattacggtgactcgacggatcggcggtggtgacggcggcgacacgggtgggggtttctctttcttatggccgagtggctcgccttggtgaaactggatctgtaccatgacgggtgctcgacgaacagtcgtcggggcttcaggtacccggcaagttttatagagaaagggggacgatgggtggtggctacgagccaccgccaccttcgcaatacgaggatctgaaggcggcaaagacggtcgtccagggcaggcgccagaggttgggactgagcacgatcagcgtgattttaaacatggtcaccagtcctacgtagattagcagcgagccgcgtaacgtctgagcagccggcagttcgtcgcggatgtaacgcgtgccgtagaaagtcacggtcatcataaggaagacgatggcgccgtagccgtagagtagaatacgctgatgatggaacacggtctggtcgccgataacccagagcgtgatgaaaaaaacgctggtgagcacccgtgagcatatgagctcccaacgcttagcgcgaaagctgtccccaaccatgacagcgccggtgcaagctatccacagcgtgaggaccagtgtgtagtcgatgaggatggcgggcaggtcggagcaccaggtgtagaaaaccgtggtaacggagaggaggcctacgtagcccatggtcaataccacgtcgtcggggtgcctttcgccctgtatcaagaccaaacaccagagaagggagggggcaaaaaccagcagcagaggggaagattcatgttgacatatgttgtgggaatcggggatacccagccaaatcattccgcagaaagccgtactgatggcgatgtgaaagaccactagggcgtagacccggacgaggacagcaaaacggcgcagccacataaggccgtggtgcagctgcaggagggaagcccattgcggcgaatgtagcgacggcagcggcgggtccatgaggcgggtgatgcgcccgagtgaacgggtgagcgtctcggtggagtcttcttataaaccagcgggtctcaagcaaccctgctctggaacgtcgcggtggtgctgttgaggatgacgctgagcgtgccgttgtcaacccggtaatgatgataggtgcccagcttggccaggtagctgaacatttggtcccagcgtgccgaccacaccacgggcgtgagcatcaggagtgtggtgtgatagatgagtgtctcggtggcgtaaagtaccagcgagctgcggatgatgtggctcacgggcattttggtggcgatgtagcgcacgtcttggaaaaggacagccaggatgcagcccacgaacacggtgtagagacacagcagagtcttatgcaaccaggtgtaagtagaagccaggacgctgaccatcaccgtcaaaagtgtggaggtgaaaagcgcgtcacgccacacagagctgagacggtgttcccaagccacgccgttgcaggccacgaacaacgtccacgttaggatgaggctggaaacgccgatgggcgctgtggcgcacagattgagcccggcggtggtgaacgagagaagcgccacatacagcgcaaacaccaggccgttgctggggtgtctgtggtcggtgagctccagcgcgcccagaaccaacaccggtgtgcagctaagcaatagcggcgagggatcgtcgcggcactcgtagcccagtgaggggtaacccagccaaaccagcgcgctaatgagtacgctgaaagcggtttccagcgtcagcaatccgtagacacgcatgacgatcgcggtccgacgtagccaacacaccgcatcttcggaagctgtggacgctgtttccgaataccgggaggagatcgtgcttccctcttccaaggatcggaaagtagcgtccgtcgtttccgcggacgcggcttccctggtacgctccgtttccgacgacgcggtttcccgctgcgtggaaactgtctccatgtcgggaccgcagcgcccggcggcgtatccgcaaggtctcgaagctacagcttgtcagaggaaaagtaggtttgcaaaaaggtgcgcagggtcatgattctcagcaccatcagcagagtgaaaaccaggctgagaaacaccttgacggccgccaaaagcgcgcgttccagcggcgtctcgtagcgtacagccagggccgcttcgtggaaatgcgagacggctagacaggtaatgagcacgctgaaggacaagacgatcttaaagcaccaggaccaaccacgcctcaagatgaccaccacgattgccgtgaaggtcaacgtgatcaaagcatggacgaccacgatctgacgacggacggtacgttcgggagccaacaacgctacgccggtgcagctgagaaaggccagtaaggtgaacaacgcggccgagatgaccaacgtaccgtccaggcagagacatatcacgatcaacggcggcacgtgaagcagcgtgtaaaagagcagaacgccgatattgctgggatgcgatgtttcgtaacagtgaatgaagatcaccgacgtgacgggtatgacaaagacgaggctgggcgaggactccgtgagacacagacgggaatggtgaaaccacgtcgcgggcgccgcgtagcagaaggcgctcaacaacgcggtcaagccggccagctgccaacccacggcgccataggtgtgcagcgccacgcggcaacagtcgacccaagccagactgcgggtcgccagccgggtctcttggatcccggggggcacgtagatgaccgtgccatcggtgggtacttgaaaccctttttctcttctcatggtgcgctgcgttctctggaaacggctgctctgtccgaaaaccagttccgaacgaaaatctagggcgagagggtggacaacggcgtcgacgacgaagcatgggacaggtcgttcggcgttaacgtcatcgcgtcggacgacggtagttctaagagacgtagatcgctcagcaggtcctgacagttgcggattcgcaagatcagaaaaaaaagggaaatgaacgtaataaagagctgtagcgacgtatgcgccacatcgcgtggcataagaacgtgacggacgaaaaggacctgctgcgaaaagtggccggcgaagataaggcccaccgtgctgtagaagcccaaaagcagccgcaggggccaagtccagggccgcgtgaagacgatgagaacgttagccagaaagaccacgacccagacgccgttgatgagggtaaattgatcggacagggtgcagttgtcgcgacagatgaagactacttccgcgcagagcaaggtgatgaccaacgtgagcacaaacgacgtcaacacctcgcggggctcctggcagacacacgtgatacctagcgccgggatgtgcgccaggaggccggcgagtaatagcaccagctgtcggaacggacgacggcagcgcgggtgccggtttcgctgagcgagaaccggtcgctcatagcggaaatacacgaagagcgcggaggccacaggcaccaggaggagcacctcgggcgcccagacaacgtgacaaggaaagcccggacgcgacttaagagtcgctgtagggaagaccagagagaagctacccaagacggccaccgccgcggagatttggaagaggagcaagccggcgattcggacgacaacctcgaagcgatgcacccagcccagcacggccaccacggccgcttcatcatagtcgtcgttgttgccgctgtcgaacagccgccgaaacacgatctgtcgctgggtcgcggtgggaaagcgcagacccatgacagccggaggctatatgaccgcgcgtctaaggcgcgagatccctggggggacttttagatgtttgggcggcccgcggttctgacaggcttgattggtggagacggccggcgcggcgggtgggggaaacgacgagtttttccgttacgccatggttcgcgtgaggtttctctgtacctcccgcaaaaggtcacagcccgaaatggaggccgcgttggtggccccggtggcgcgtgacgataaccaggtcatccaagcgatgagtttgtctaatgagtcctcggtggtgaagaggataagaatgagcaggtacaagtacaccaggttctcatagagacacaaggtgagcaggtcggcctcggaccacgcgatctcaaacaggcgcgtggtgtcaaagaccgtgacgaccagcatgaagctgagcgccatggcgtaatagcccaaaaaaagtttgtgccccaacggtacgggctgcaggtaaagtgcgatcaagaacgcgataacgccgatcacaaacagcgtgacgatgacctgccatcgacggtgattatggccggctagacccgtgacgcagctgcagaggctaaaaagcacgcaagccaagaggcccgagaaggtcaccagcgtagaggaggagcaggcgctggccacgatcaccgaaagcgtcgtgagcacgctataaatggtgagcaggcccgggctcggcggcgacgtgaacgatccttcatcgcgtttgccgtgcagcagggccaaacagatggtgggcaccatcaaactcaagggtggcataaagccggtgcaacagagaaagacggtgcctttaagatgcggaaaagccagcaccaggcccagacagagcaagaaggtgcaggtgccctgcacggccacggtgctgtagacccgcatacaaagtaaaaagcgacgtacgtcgttcgtcgagacggaggaaatcataatgactccgcgcgagggtcgcgggggtgggggcgcccaggccgtctcggtggcctctgagttcggagacatgacggcggtggctatcaaaaggcgcgtatgagaaaccgtttatagagtgtaatagaatcaccgtcattcccacacggcgttcccccataaagtcacgtcacactcgagtaagcgtgaaaaagctttattgttgaataaaaaacacgagtacaacaccgagttgcggtgtcctgtctgtctactgggtgggggaggttcatcgtctgtctctagagggaaggtggggaacgtctaagcgagcgggagcgtgtcatctcccccatctttttacaacaagctgaggagactcacgccgtcgatgcgtccgccgtgtttctcggcgtactgctgcacccagacgtggccgctaaagatggcgacgctcatgtttaggagactcatgacgatggtgtacaacacgacgctgacacagacgctgtttttagacagcgttccacgctggtagatgagatccagggtttcgtaaataagcacggccgaagcggcggtcaccaccaggacgtagagtccgctgtagatcttgctgacccacagcacgggcgaaaagtaaagcaataggtaaaagacgatgacggaccagccgtagccaatcccgatgactttccagcgcgtgggattgttgccggccaggtaagtgagaccactgcagagaacgaaaaagaccatcaccagggcaaacgacagaccgatgacgcgcctttctccgcaaaagcccgtgcacacggtgatgccggtgttgatcagcaggcacgccaccgtgagatgagcaaaattggtggtgtgtgggcgaaactcggcgaaaccgcgtagcatggccagcgtggacacgggcacgatggaggacagggctggcactatgccgttggcgcactgtccttgcacatcggggaaggcgagccaagccagcaggcagaccgtgagggtacaagccagctgccacacgagcccgtgatagacctccatgagcagcttgaagcgtttcaaccactggaagagctgctgttcggccaccagcgcgtggctgcgatggagcggcacgatggtgaccgtcggcgactcatggtgttcggaaaccgaggcggtgtcgcccatgctgccgcttacgaccgctgtcggtctaaggtaggcgtcgatgaaacagtccgtcttatcagcacccggttaccacggatttgattgacgtcacgagtgtggtcaaaccgtggcggcaccctgtatccgacccgtcgtcatgggctccacaaccagagcctcagaagatggtacatgccgatgaataaagccacattttcgacatagaggcgtagcgaggactgaaaactctccgggaaagaactctgacaggtgatcagggacagatcgtgaattagcatcagcgtcaccgtcaacagcgtcgtcgcgtgtaaaccgagaaagaacggggtcgcggcctgcagcagccaaaatcccagcgccgtagcgcagagcagagacaggaccgacggtagccacagccgccggagagacgcgccaggatcgcaacccaaaagcgaggcccccaggcagccgagatctaccgccagggcgagaagagccgcgccgagaaaggcctgcagcgacggctgacacatcagcaaggtcagaaaggctagcgcgtgcggcaggcagtaagccaacaggagtaggagtttgcggggacaacggtcgatcgacggaccgcgtagcagcaggaacaggcagccgacgggtacgacgagactgagatgagaaagcggcggtgggtcgtcgtcccgtccccgttcgcatagctcggccaccggtggcggcatgagccaccagctgagcacgctgagggcgacggtagcgataagctggaaggcgacgaggacggaggcgcgcagccataccgccagcctctctaggtaggggactacctcctcgacggtccattctagcgggacgacatgaagcatggcgacaagcgcggctgctctgaaaacgggcacggttttataggcattaggacgtccccgtcgtactggcggctgtcaaagtcccgttgtccaaagacgcgccgtccgaaagactaatccaacggggacccgagagcatgagcaacaacgtgagaaagatggccatgctgtccaggtagagacagacggcatgacggatgcactggttaggtgggcagaaaaagatgaccatgagactgtcgtaggccagaatacccaaaaagaaactgatggagaaggcgcacaacgtcactactatcttctgcagccagtcggcgtcgcttagcagagcgagcgtgaggaacgaaagcagcatcaccacgtagacgcagctgatgcatttccagcgacgtcggtcacggccacctagaaacgccagtcccgtaaaggagataaacaacgccagggtcatcacgtaggaacctactagtacgcggctttcagagcacatttggaagatggccgccgtcaggctgttggccaacagatagataaaaagcaccgtggcgttactaggatgctcgttgcccaacgtgtacgtgatgaacatgcagacgatgggcacgagcacggtgagaaagaagctgtagttctcgacgcaaaagttgcggttttgtggaaaccccaaccaaaaaacgcttcccaaaccgaagctgaaagccagctgaaagatgaagatggcgtacacgcgcagccatacggtgaactttttgaaccactcgagagcctccatgcgggagagcaacagcgcgttagcctcctgcgcctgcatggtggcgacggtctcggcacaaagccgctgcggcgcacctacccttctcttatacacaagcgagcgagtggggcacggtgacgtggtcacgccgcggacacgtcgattaggagacgaactggggcgacgccgctgctgtggcagcgaccgtcgtagcgaccgtcgtctgagcagtgtgggcgctgccgggctcggagggcatgaagtagagcacggagacaaagaggtacatgaggtccatgtacaagcagagcgcgcccgggatataactctcatactcgatgtcgtgcaggatgtcctgtgtatcgcacaccaccgaggtcacgatgacggccaaaccggctatcatcaccaggatctcacttaccgcctcgggaaaaagagaaaatacggcgaacagtaagagaatcagcgtggatgcgcccgtcaatagggaacgctgtaattccacgtcgcgggcaaacagatacgtagcgagcgtaaggaaacaaaatagcgttactgtggccaccatggcataaatgactgaatgatgactaaagtggaagcctgacgccgtgacagccacgctggtaagcaacgtgtacgtcagtaagatccatacgtttttgggaaagttgggctcggcccaacgcaacagacctaggcacacgatggagatcattaagcaagacagcgtcagacgcacgctggaaaagagctgctccagccggtgcggcaacaccagccagcaaaaggcgcagacgctcataaggatgaggcattgcacccagataaggatgtagatgcgcagcaggaagaccgaccgggctatctggacctgaccgcggagcgacatggcggcaacgccggcggttatcgccgagatccgtctaaatacacgaagcgaactagaaaacgcacacacgttatttgcaaaaagaaagcagctgccggcttattattttattaaaaatttatctgtgcagaatcataagtttatgatgaataaaaacggggaaagggaatctgcttttagggacccgggtctggtccgtcatctcccatctggtcgggttcggggatggggacctgtttcagcgtgtgtccgcgggcgtgcatggcttttgctcgccgaccgcgctgtaaccaggcctctttctctgtggtcggcgagtcttccgacgggtagggagtctgggagtccatcgcttcaggcccaccgctcgttccctcgaccgtcgtgtcgtcctcgttttcgctattacacggggtttctggagtatcgcctatacggttagcgattctccgggggcggccgctctcgtcctcgtcgctgctatcgccgcccggtaattcgacgccgcattcgttgtacggagcgcggcacatgggcggcggaaagaacttgggcatgcgaaagcagcgttgtccatccacggtctgcgtggtttcatcgttatcctcccataatcccccctgtagcgccggcagcgtttccacgctgtgagagggaaaggcccagttttggttgtcttgcagcgcgcccgtgggcagtaggtccgtgcggccccaggcgctgctgttgttgggtaccttgtcagtgccgcgagtaggtcgcagaaaccaatccagagcgctctctagctgcgagcgtgtgatggtgcccagtgcgccgtgccagcgcagcacgtctcttttcagcgtgtggtgacagacgggcagctcctccaaccgacactcgccgcgcaatccgcggtcgaagcggcagagaccacgcagtttaagcagaccgcacttgagaaacatgtgaaaattatcggcaatgcgatacaggtctgagtcctcgatcttgtgtaggtagaccacgccaaacttgtcgagcagtaccaggccgctgggcacaaaaggcccgtaggccaggtaatagcccacgaggccgacgacgtaccactcgcagcacaagcgttgacgaataaagttcagaagatcgcgaaagtccgcggccggcatgtggtcaaaaggccggcaggcgcgcaggccctcgatggagcccagcatgagcaacggctccacctcggtgcgacccggcgtgcggatgaccaggttgagaccgctcatttcgcgggccgtcttggccacggccgcagcgtcagtggggtcggtgcagaggaatttttgcacatggtagcgcggttcggtggtggcgaacggtgtttgtgggtgccgatacacatattcgcaccagagtagaccgttcttggaaaaagctttgatatcactggccacctcgtagagcccgtcggtctcccagtcgtagacgtagacggtgccgtaatgacttagcatgagcacgcagggcagttcctgcgcctgcttggtgtttcgtgttagatcgctgtcgggtggacgtacggctagtacaccgacggcttccagggtgtcatcgcagcagagatagtcggcggccagagaacgtgcgtaaatctgcgggatagcggcctgttcgcgcatcactaggaaccagttggcggggttgcgcagtgctacggtggttccctggtggcgctgcacgtaggttctcagcgccggaggatcgtactggcgcagatagaggccttgcagcatcgataacgtcttttgaaagacggtgtttctaaattggaaaacgccgtagtcgcagcggatagcatcttcgcagcgctcgtcgcgctgtcggagataggtgccccaggcttcggcggcggctttggtgagtagggacatgccggcaaagccgtctcgacagcgagtcggataaagcgcgctgcgcgaaagcttaatataggagcagcgtcagacgaatcgcggctggtggcccggggggtgggacgcgccgcctacacaaagtgctcccgaaaatcgaaactcttgacccactccggagacaaatccgtattcagattgatgcgtcgcgcttccacttcggcttccgaaacctcggcctccgtccggtaggcgttaacgatacgctgacccaggtgccaacgttctttctctgccaaacgccgttgctcaaaccattcgtctacgtccttgaggtcaaagacagtgtcctcctcaaggtcaaagcctaggtcttcccactcgtcgtcatcgctctcgtggccggcagccatacgcgcggcaaccgcgtcttcccctcctcttctttcaacgttgggtaccacgttgttttcttcgggttccataggttctgcgccactgtcgtcatcatcctctccctgctcctcatcgtccgtcaaggcgtcgtggattacctccaggttctgattgtcgggtacgacgtggttatcttcgtcgtcgtcgcgcggcatgggcggcggccgacggcggacgaccggcatggcgcggccgtcgtttctttcgtcttcctcttctccgtctcccagggaacgcggtcgacggcgttccgcgaagtcgccgcggaccacgcgcgcctgccagatggtaaatgcgtcccaaccgtcccagttatttagcatttcggcgcggaaacggtcgcctcgacagagccagcgaaactgccgcgcgtagtcgcggtctacgccgctgtcgaacatggtaaagtgaagacgcgccgcctcgcccatgtgtacgcagcctccgttgcgttccagcctggccgcgcgccgcagaccgtgttcgtagcggcgacgcacgtacaccttcatgaggccggcgcgaaagagttcctctaggctgtcggccagacggtagatttcaccggctagacgctgcaggggcggcgagcggtccaggtgcgacttgacgattaccacgtaaaaacgacagaaacggtcgaagatgatgaggaatgacgtgtcaaagaaaccaccggcgcggtaggagcccacggcgcccagcaggtaccagcggcaacgcagttgcagcgtgacgtacatttcgcactcggccaagcgggcggctggcgctacctcgaagggccagcagtccgtcaagcagccgaaactggtcaggagtttcaacgttttggcatggcgtccaggtgtatgaaagttcacgtcgcgtccgtggtgttcgccaacgcaggcggccaacgcgtcggcgtcatgaccgtgacgcagcagcatcgctaccacgtcgtgcggtacccgcgtagcaaacggcgtctgtggctgacggtatacggcttcggtgtacatcataccgtaacgcgccagttcgtccagatgacgcgcgcacagcagcagaatctcttgcgagggttcgtagatgtagaggcgcgtaccgccacccatgcagagcaccagctccgtctcttcatagtgatcttccaccatgatcacgcatttgcctagcacgataaggcgttcggggcaacaaatcacgtcgtccagcagttggtcgcgcagctccggcatggtgctgccaggccgcacctgcaggaaccagttgtgcggaatgccgagcgacaacacctggtcgacgtggttacggacccagtcgcgaagcacgtcggcgctgtactggcactcaaagatgccctgaaagtcgcccatgacccgcagaaaagtttcgtagcgcgtgtggcaatagaggaattcatcgtttcgcgtaaacgtgggagctccgtcttcccagcgtgtacgccacatgtcaaaagaggccgccagctagacaccccagaaaagaagcagagaaagagagttctttgtgcgacacgttttattccgcgtcctccgctcgacgctcaaatctggatgtactcgcgcacacccgtcaggctctttaagggaaaagggtccgagtacgtcactaaccgcgactgatgcaccagggcggtaatcacccgctctgcgccctcgcgcgtcgacgaacgcgtcgtcaccaggcagtgcagccgcgggcccgtatcgtcctgatgaccagcggcctcgcgctcggctgcttccacaccgacaatgtcgggatccaacacgtagctctgcgagttggtgtcgtagcggtgtagcaccaacgtgttggggtccagacgctcccacgcgccctcgtgcgggtcaaaacgctccgttaaacagagccagtcatactgctgctgcagaatacgccgctcgcgctcacgtcgctcatcgggcaacgcggcgtcttcgttgaagagaatgtcccgcttgtggtctacggcacgctcgtggtggtgcgggcacagatgacggtgttccatacgcgtctgacgttgacgctcgcgctcaaaacgccggtgtcgaaagaccattttcagcaaccccatgcggaaaaactccgtgatggtgttggcaacgcgtcgcacgtagtggttggggtcgtccatctggatggcgtacacggcaccgaaccagtccagcagtaccagcacttcggccacaaagctgcgtcccggtcgcggacgtcccgtcacgcctagcacataccacggcgtggccagattagcacggacagcccaccaccaacgacggctctccacctcggtgagcgcacaaaagggccaaatgcggtgtaactgctgcaccgttttcatcagccgcataatcaccgtgccgtaacccggtgtatgcaacttcacgtcgcaacccaggattcgttcggccgtggcgtacgagccctcaggcgtggtgtcattgagaaacaaaacatgcatggtacgcgcgcccttagggtatcgtcgcggaacaggtaccgtcattctccgcaaagtggtgtgaatcacgtcgcgatacgcaatctccgaacgtgacacaccgtaacgtgccagttcgtccaggttgtgcgataccaacaccatgtacttttcacgggtgtcgtaggcgtagacgcgagaaaagcgacccataaaaaccacgtacggggtagccaccatgccatcatggtgatcgcgacgtggctcgggcaacaaaataacagcgtatcccaacggcgtcagcggctcgcggcaacagatgagctttgacgccgcctgtttggcggcggtaatgatcccgtcctccgtacgtaacatcacatgccagcccttggggggacccaaggacagacagcgtccctcgttacgatgaacgtaacgcgtgatttccattggctccaggcaaaagaacagttccttaaaatcccgcaacacttgtcggtataacgccatgggatcctcggccgccacaggcagcgcggggagctccggcggcacaactgcagcgccgtcagggccagaacccgcagccggatccatcattgcgcgacactctcagccggacaaccggcgtcactgacagaagccgaaccaaatacagagaaagcaacgctacaccgtcaccccgctcccaagcgccgcggaaagtgctccgatttttcaccgtcgttcgcgacgttgatttgcctcggtctgagaaccgacctagcgttcggaccggtgcgcagaaacagccggcggtccgagccactgagcggttcacagccccggccgccgatagttaccggagagacgttcgagctgcaggtacatcggcgctccccgcttcgccaccccgcgcccgccccagtttatactctccgacgtcccgtccaacgcgcctgtggagggccaatcggaccgcgggagctctccaagtggatgacaggcacagccgggtggccgaccgtgaagagccctcatccacctgaacagaccgctaaccgaaggaccccgagtcgcgtccgttggtcccgacgtccgtcgccatctggctccctgctgttggctacctctcggatttcaaaaaagagcacgtgccgatgacggtgcacaggaaagagccaaagtgtcacagcgtctttttttatttgtattcctttcctgttttgtactcgtaaactgttgacgttgtttttacatccaaaagggcaagtaagaaacaggatgaggcatggtaggtttgggcgcggggcggccctccagcacggcggcccgggccgcccggcgggtgagcacccggcgttgcgccgtatctatcttgtgtttcttctgtgtctttttcctatcttgttccgcgacggcctctttcatcacgttcagcatgcgttcctcgacgccctccagggatcctggggaggagggagtcctagtgaggcttccaatgttgttttgtggattttcggtttcctcttcttggtcgtcatcgtcggacgtgttgtcttcctcttgatcctcttcttcgtccgaatagtagacgcatagtccctggttcatcaggctgggattcatcaggttctgacggggaatccgctgttgtagacgtttaaccgcccgttccaggcgagagctcatgccgcaccagacgctgtaacgccgcacgggcccgtagcgggctgtttgttcgcgtacatgatcgttgagctcttgccaatattgtttggcacactccagatcggaggtttgtggatagtcgggtcggatccgcggatcccaactgacatcggcggtgccagagacttcgtccagactgttacgcatagagcaccagtcgggtcggacgataaacctgtccttgcggattaaccatttataacgtagttcgtgatggcgtgtagaggcccgtacacgctccacggtcccaaagcggtcccagaagggaaagttttcgtgagggcagcgacccggcacttccagacgttcggcgtcgtccacggcgtagtgaaaacgccggccggcctggtaaattttgagcagacccacggttaacaacatatccacgctgtcagccaaccgccagatctcgcgtcgagacacgtcaaaatagaaaaattcacaggctcggtcgaccaggatcacgaaatcggcgtgaaagacgccggagggtagcgactcgcccaccacacccattatcatggtttcacagcataagcggtccacaaagaacttcaacaggtcgttgaattgctccgtctccatacagatgaagggccagacgcctttgaggttctcggcctggccgcagagcagcaacggacgcgtcatctcgcctggagtgcgcagaggcacgcattcgccgcgataacgacaggtcacacgctgcagttcgctgatgctgttgtcgtgcaggcgaaggtcgcagataatatgatccggttgcgtggttagcagtggcgtgcgcatctgctcgccgtagatggcctcgcagtgcaacagtccgtgtcgcgcaaaatcatccagactgtgcgccaggtagtaaagcaccccgcaatcgcggtctaaacaccacacggtttcgtaacgtcctagcaggagcaccagacgggcctggctaggtggctcaatttcctctacatatacgaaaaagtcgtcatcgtccgagtcctcgtcctcagaagaggaccgcggcccgtgtactctgggcaacacggtggtagagaactgcaggacgcccagagactcgagcgactcttcgcagcagatgagctgaccccagggcgtttcgggcccgtcggtgacagccgcgctgccaaagatgtcctcaaactctacaaaatctagacgccatccgggtggcgctgaaacgggaaggctaatgttcatatcagcatagctacgaactaagtggcggatgtcctgccgcaagtcttggcagagaatgagctttcgtaaacccttgagggtcctccgaacaacggccccagacgcgtagcgataggactggcgcatggtgccgcggcgtggagcggcacttggcagcctattttatggagtttcttcagtgacgtggcttgttcacgtcgttcgtgggctgcggttggcagctccggtctgtaaaccacccgaaaagactgacatcgacgtcaaagactcacgtaatttggaacatgtgcgaccgcaaaatgcgtcagaatagcacgtggctttaggacataaaaagtaccgtgaggtctagacgtggtttttgtgattgacacttacaccaggtaagccaagggacggtgaaactgtatgtgaggaacctgggtgcttagacaactaacgtgtaatgctttttacaggaccgttcaacaggtgatactacctgcaaggtaatgactacatctactacaactaccactaatatcatgctacaggtgagcaacgtaacgaatcacaccttgaatagcaccgaaatttatcagttgttcgagtacactcggttcggggtatggttgatgtgcatcgtgggcacgtttctgaacgtgctggtgattaccaccatcctgtactaccgtcgtaagaaaaaatctccgagcgatacctacatctgcaacctggctgtagccgatctgttgattgtcgtcggcctgccgttttttctagaatatgccaagcatcaccccaaactcagccgagaggtggtttgttcgggactcaacgcttgtttctacatctgtctttttgccggcgtttgttttctcatcaacctgtcgatggatcgctactgcgtcattgtctggggtgtagaattgaaccgcgttcgaaataacaagcgggctacctgttgggtggtgattttttggatactggccgcgctcatggggatgccacactacctgatgtacagtcataccaataacgagtgtgttggtgaatttgctaacgagacttcaggttggttccccgtctttttgaacaccaaagtcaacatttgcggctacctggcgcccatcgtgctgatggcgtacacgtacaaccgtatggtgcggtttatcattaactacgtgggtaaatggcacatgcagacgctccacgttcttttagttgtggttgtatcttttgccagcttttggtttcccttcaacctggcactatttttagaatccatccgtcttttagcgggaacgcaaaacgagactctccaaaccgttattactttctgtctatacgtcggtcagtttttagcctacgttcgtgcttgtctgaatccggggatctacatcctagtaggcactcaaatgaggaaggacatgtggacaaccctaagggtattcgcctgttgctgcgtgaagcaggagataccttaccaggacattgatattgagctacaaaaggacatacaaagaagggccaaacacaccaaacgtacccattatgacagaaaaaatgcacctatggagtccggggaggaggaatttctgttgtaattcgatcctctctcacgcgtccgccgcacatctatttttgctaattgcacgtttcttcgtggtcacgtcggctcgaagaggttggtgtgaaaacgtcatctcgccgacgtggtgaaccgctcatatagaccaaaccggacgctgcctcagtctctcggtgcgtggaccagacggcgtccatgcaccgagggcagaactggtgctaccatgacgccgacgacgacgaccgcggaactcacgacggagtttgactacgatgaagccgcgactccttgtgtttttaccgacgtgcttaatcagtcaaagccggttacgttgtttctgtacggcgttgtctttctgttcggttccatcggcaacttcttggtgatcttcaccatcacctggcgacgtcggattcaatgctccggcgatgtttactttatcaacctcgcggccgccgatttgcttttcgtttgtacactacctctgtggatgcaatacctcctagatcacaactccttagccagcgtgccgtgtacgttactcactgcctgtttctacgtggctatgtttgccagtttgtgttttatcacggagattgcactcgatcgctactacgctattgtttacatgagatatcggcctgtaaaacaggcctgccttttcagtattttttggtggatctttgccgtgatcatcgccattccacactttatggtggtgaccaaaaaagacaatcaatgtatgaccgactacgactacttagaggtcagttacccgatcatcctcaacgtagaactcatgctcggtgctttcgtgatcccgctcagtgtcatcagctactgctactaccgcatttccagaatcgttgcggtgtctcagtcgcgccacaaaggtcgcattgtacgggtacttatagcggtcgtgcttgtctttatcatcttttggctgccgtaccacctaacgctgtttgtggacacgttaaaactcctcaaatggatctccagcagctgcgagttcgaaagatcgctcaaacgtgcgctcatcttgaccgagtcgctcgccttttgtcactgttgtctcaatccgctgctgtacgtcttcgtgggcaccaagtttcggcaagaactgcactgtctgctggccgagtttcgccagcgactcttttcccgcgatgtatcctggtaccacagcatgagcttttcgcgtcggagctcgccgagccgaagagagacatcttccgacacgctgtccgacgaggtgtgtcgcgtctcacaaattataccgtaataaaaaagcgctacctcggccttttcgtacaaaccccgtgtccgcccctcttttccccgtacccgatatacacgatattaaacccacgaccatttccgtgcgattagcgaaccggaaaagtttatggggaaaaagacgtaggaaaggatcatgtagaaaaacatgcggtgtttccgatggtggctctacagtgggtggtggtggctcacgtttggatgtgctcggaccgtgacggtgggtttcgtcgcgcccacggtccgggcacaatcaaccgtggtccgctctgagccggctccgccgtcggaaacccgacgagacaacaatgacacgtcttacttcagcagcacctctttccattcttccgtgtcccctgccacctcagtggaccgtcaatttcgacggaccacgtacgaccgttgggacggtcgacgttggctgcgcacccgctacgggaacgccagcgcctgcgtgacgggcacccgatggagcaccaacttttttttctctcagtgtgagcactaccctagtttcgtgaaactcaacggggtgcagcgctggacacctgttcggagacctatgggcgaggttgcctactacgggggttgttgtatggtgggcgggggtaatcgtgcgtacgtgatactcgtgagcggttacgggaccgccagctacggcaacgctttacgcgtggattttgggcgcggcaactgcacggcgccgaaacgcacctaccctcggcgcttggaactgcacgatggccgcacagaccctagccgttgcgatccctaccaagtatatttctacggtctgcagtgtcctgagcaactggttatcaccgcccacggcggcgtgggtatgcgccgctgtcctaccggctctcgtcccaccccgtcccggccccaccggcatgacttggagaacgagctacatggtctgtgtgtggatcttctggtgtgcgtccttttattagctctgctgctgttggagctcgttcccatggaagccgtgcgtcacccgctgcttttctggcgacgcgtggcgttatcgccgtccacttccaaggtggatcgcgccgtcaagctgtgtcttcggcgcatgctgggtctgccgccgccaccgtcagtcgcaccacctggggaaaagaaggagctaccggctcaggcggccttgtcgccgccactgaccacctggtcactaccgccgtttccgtccacgcggatacctgacagtccgccgccaccgtaccagcttcgtcacgccacgtcactagtgacggtacccacgctgctgttatatacgtcatccgacatcggtgacacagcttcagaaacaacgtgtgtggcgcacgctacttatggggaacccccggagcccgctcgatcgacggctacggttcaggaatgtgccgttcttaccgccccaaattgcggcatcgtcaacaacgacgccgcggtctctgaaggccaagaccatggagatgcggttcaccatagcctggatgtggtttcccagtgtgctgctgatactggggttgttgacgcctccgagtaacggctgcactgtcgatgtcggacgaaacatgtccattcgagaacagtgccgccttcgaaacggtgcgacgttttccaagggagacatcgaaggtaacttcagtgggcccgtcgtcgtggagttggactacgaagacgtcgatattactggcgagcggcagcgacttcggttccatctcagcggactcgggtatcctacaaaggaaaatacaagaaaagacaatgaaagcgacgtcagcggtggaattcgctgggctctatatatacaaaccggtgacgccaagtacggtattcgtaaccagcatttgagtatacggttaatgtatcctggggaaaaaaatacgcaacagctgttgggctctgatttcagttgcgaacgtcaccggaaaccgtccacgccgttgggaaagaacgccgaagtgcctcccgcgacccgcacgtcttctacatacagcgtcctcagcgcttttgtagtgtggatcggatccggcctcaatatcatctggtggaccggcatcgtgcttctagcggcggacgctctcgggcttggcgagcgttggctaaggttggcgctgtctcaccgggacaaacatcacgcatcgcggaccgcgacgctccagtgtcaacgcgacatgttacttcggcaacgtcgacgggctcggcggctgcacgccgtttctgaaggcaaactgcaggaagagaagaaacgacagtctgctttggtctggaacgttgaggcgcgaccctttccgtccacacatcagctgattgtgctgccccctcctgtagcgtcagctcctcctgcggttccctcgcagccccccgagtattcgtctgtgtttccgcctgtataaaaataaagagacgagaggctgatcgcggccttcagcgtctcatttgtctttactctccagtgcggtcggtgtctcgtcggtgagacgaggccgccgcccgacaagttcgatctcatgtcgctcttggaacgcgaagagagttggcgtcgcgtagtcgactactcgcacaacctgtggtgtacgtgcggtaactggcaaagccacgttgagattcaggacgaggagcccaactgcgagcagccggagcccgcacactggctggaatacgtggcggtccagtggcaggcccgggttcgcgattctcacgatcgctggtgtctctgcaacgcctggcgtgatcacgccttgcgcggccgttggggtacggcgtattcctcgggttcctcggcgtcttcctccggttttgtcgcggagagcaagtttacctggtggaaacgactgcgccacagtacccggcgctggttgtttcgccgccggcgagctcgatacactccgtctaactgtggggaaagtagcactagcagcggccagagtagcggtgacgagagtaattgcagtctacgcacccacggcgtgtacacacggggtgaacaacactaatcgataagtcgcgtgtaggcgactggctacatcaaccggatatctgtggggatttaaaaagacgacccgttgtcatccggcttagagcaaaccgtccttttatcatcttccatcgccatggctatgtacacatccgaatccgaacgcgactggcgtcgtgtaatccacgactcgcacggcttgtggtgcgactgcggcgactggcgagagcacctctattgtgtgtacgacagccattttcagcgacgacccacgacacgagccgaacggagggccgccaattggcggcgacagatgcggcggttacaccgtctgtggtgtttctgtcaggactggaagtgtcacgcgttatacgccgagtgggacggtaaagaatccgacgacgagtcgtcggcgtcttcctcaggtgaagcgccagagcaacaggtccccgcttggaagaccgtgcgagccttctcgcgggcctaccatcaccgcatcaaccggggtttgcggggcacgcccccaccacgcaacttgccgggatacgagcacgcctccgagggctggcggttttgcaatcgacgggaacggcgagaggacgatcttcgcacgcgggctgagccggatcgcgtggtgttccagttagggggagtaccgcctcgccgtcaccgggaaacttacgtgtaagaacacggcgtgataataaacaacatagcgtaaatccccgtgtgatgtgtgtgattgacgttcaggaaacatgtccccatcatcagcgtcacaactgacgcgggttggttactgacgtgcaggatgttacgcgagtcagagaatcgcataagaacggggtggtgagcgggttcccacaggagtctctggcgcaaaagcaccatgagcctcaggttccccgagagggcgggttacgagaaactgggacaccgcccgcatgccaaacgcgtgcgggtgcatgacccgttgggattgacgcggtttatcatgaggcaactcatgatgtacccgctggtgttgccgtttacttttccgttttacgtgccgcggtcctagcacgtcagtggtgacgctgataattgcaacatggcccatgacgaacccgcttgggacgaacgtcaataccacgtcaaaccaccgtgacttggctgaacgttgaaacataaagccaaagcgccgtcggcacttggcttcagagcagcgcctcggggcgatgcgacggcgatgaacttagagcaactcatcaacgtccttggtctgctcgtctggattgccgctcgtgctgtcagccgcgttggtccgcatggctccggactcgtttatcgtgagcttcatgatttctacgggtatctgcagctggaccttctgggaccagtggtggcggggaatcgctcagtccggacctggagagagcaggcggaccgagccagagggaccttcgctcggcgttcaggccttaatactagccacatcttacctgtcggcagcatgtatcggggctccgacaccttatccgccggcttgtatcgtcccgaagaagaggtgttcctcctcttgaaccgctgccatgggccactgtcaacgccgaaaaacgcttgtctggctgaggtcggtgtcgctaatgccacttttttgtctcgcttcaatgtcggtgattttcacggagcgtcatgggaaaacggtaccgctcccgatggagagcccggggtatgctgaaattcttcttaaaattacgtaaacgacgtcgtccagtcgttgtgccgcgattcgtacggttcatcgtctacgtcgttttgttcaccgtcgctgtgcaacgtgtgaaacaagagcgtaatgcgcaccttcggcggtatgaagaacggttacggaaagaccgcgcacggcgtcggcaatcttttccgtgacttggggcgatgggtccgagctgcggtatgggtcacggcagcgtgtgtcttgctaacgaagatgccgatgtgtgactaaaaacgtcccagccccagagcgatatgtttcaataaaaaaaatatgtagtatcatatcatgcgtgtcctggtttttcatttttggatatatgtatcgcataaagggtggcgaggtgtgaggatgaaacatatgcagatacgcagttttgttatccgaacgaaacccgtgtaatgcgtacaacggtacttcagtatgaaagtcccgtggggggggggggggcaaatagtcgcgtttgccgttgggcgtacgctacgtttgtatttctggctataatatgtgcggtcatgtgtcgatgttcctattgggaagggtgtgactgtagggtgtataaagtacggtgggacgcagagggacattgatagaaacaggttgagcgctgtacgagtttcacacgctgattcggcgccaagaataaaacagtggttattcgtaaaagtatggggggggggatgttgtcgacggttgttagatgcattgcgtatctgtattagtagttttgcaagccgtggtgcgtgttattgtgacgtagcaattatcgtattgtgcatgtgtcgttcatcacagagtttagtatactaatatgaagcgtcgcgagtattaaagcaattggtgtctctgtgctagtctaacaacacctgtgtaatgcgtacaaccagaaaaaagacgcgaaagcaacgtgtatgggggggggggggataatattgctaatcatgcgtcttgcagtacagatagccgctgtatcttacgcgtattgtcgcaatagttccacatcggtgtaattggatgtctgttacttatcactggcgtcgttataacattgtaaaacataagttttcgaaacataacgacagctgcaaaagaaaaccagtttattgagcattgtaatggtagtgtgtggctatattagaaaacgtgacgcgtcgcatgtcgcggcacaatctggcagcggggtcggggtagggtacggtgggaggcatgtacacagatggaacaaaagcagaagtaacgtgagacggagcatatagtccagtatccagcggttcctgagtagcaccacccatcaactgaatgccctcatgagtaaaagtctgcgggcggcagcccttggggaccgttggcatgggacgatcaatctccaaaccacagcgtaacaccgttttcttccaacgtcgttgatacacgtcgtttttacggttactccccagaacccagaaagtctcgtccaagtcgtaccaggaatcttctccggggagacgcgacggtttccaatcctcgtcgtctcgtctcaaagcacgtcccaaactggcttgaggagtcaacggtggttctgtgggtcgggtgtagcgcgagtgttttcccttcatgagcgatccgtcctccttgcctttaggctttttggtctttttgtgtatcatctggccgccggcctccataaccaccgtggccaagtccagtcccagagcttgagcgtcggcgcggcgtcgggcgtcttgcaggtagtcttccacatttgcacagatggccgggtgtttggtggctagggtgaggacctcagcctcgccgcgacccggacgtagcaaaaaagctaactgcccgtgcggctcgcgcgcccacagcgcggcgcgcgggtgcaggtgcagcgcgtcccagcgcggccgctcccactgctcgcggtccagctcgggcagcagccgccgcgcggcctcggcggcgggcgccgactcgcgccccagcgccagcgcgcccagcacgcccgcgcgcagaaagtgcgacagctccgccgccagcgggtacacgtgtccgtccagcgggcagtacccgaacacggcgcccagctcgtccagcaccaccaccagcatggcgcgcggcacggtgtccgacgccgccggacccgccatcgccgccggacccgccatcgccgtcggacccaccatcaccgtcggcgccgccgccgcgtccgccccgaccaccgtgtgcgcctccgcgtttggcacgcacaccgcgtgcccgccggcggaggtgccgtacggctgcggaggcacaggtacagcggaccccacggctcccgccatcgcgcacggcgcgtccccgccggcggcctccgtctccgtgccgctcgcccccgccagcaacgtcgtccccgtcgccatcgccgtcgtccccgccgtcggcgacgtcgtccccgccgccgtccccgccgccgtccccgccgcgcagcccagccaccgcgcgggcagcaccgcgcccagcgccagccagccgcagcacagacgctggttcaggtgccgacgcacggccgtcagcagcgacgcggggtgcggcgccgacgcgaacggctcgtactgcgccagctcctgccacgcgcccagcagcaccatcggctgcagtcgcctgcccggcgtctgcagtgccaccgtcgtgccggcccaccgccggcgcagctctcgtccgagcgccgtcgcctcctcggcgcgcagcaacgtctgtcgaagcgccggctgaggcagcagcgtcgcgcgcggggtgcccacgcccagccggttgcagcggtacagccgcaccacctcgcccgcgccgtgccgaaaccactcgtccgcgtcgcgcgccgccaggatcagcgtgttgttcgccagctcgtacacgaacacgcggaacccggcgcccagcgccaggtacagtccgtcctgcgcgcacagaccctcgggatggccggccttgtcgcccaccgtcgggtcggccgcggggtccacttcgtgcaccacggtcgccaccagcacgatccacgcgtcccgcggcgacagctgacgcaggtccgtcgcgcccacgccgttcatctggctgcgcggcgtcacccgcgcgtagaatccgtacggccgtccgagcggcagcagcgtgcccgcgtcgcgctgcgaccacttgcgcatggcgcggcccgtgctgttggccagaaacgccgcgcgccacacggcgcccatggcctggtattccagctccgtcagcgcctgccgctccacgggaatctgagacagcaacaggcgctccgggccgtgccaaaagttgctgttgttgccgctacccggaggggcgcccggcggcccgcggggttctacccggtggacgccgtggcccggagttgccgtacccgcagtactcgtactagtccccgccgttgacggtacagaagaggaacaggaaccaaccctcgaaggcccgccggcaccgcgtccgcgaccgaggggcggggggcgcggcgacatgccgttgcgctgggccatggccgccggacacctccgacgtcgagccgatgtccactagatagcaacacaacccgcgtccgcgaccacgccgtttacacacgcggacggctccgtggcccgtgtgccacgggcgacacgcatctggcttttatagccagcgacgtgaacggcgcgtgctagcgccgccttggcgccgcgcagtctaaagggctgtggaaaaccagccggcagcccagccacccgaaggaacacgcgcgacaggcccgcagcaccggagcgcatacgcgcgtcccgagcgcgcaaccacctaagtggacgccccacatccattccgggccgtgtgctgggtccccgaggggcgggggggtgtttttagcgggggggggtgaaatttggagttgcgtgtgtggacggcgacggcgaatagttgcgtgtggtgcggtggggacggcggtcgcggacggcgaataaaagcgacgtgcggcgcgcacggcgaaaagcagacgcgcgtctgtgtctgtttgattccccggggaaaagaggaaaaagtccccaggggacggcagcgcgggtccctggggacacacgaagagacaagacgcagaaaagaggaagtccccggggaaaacgtgcgaccgcacccggcacacgcccgcgacacaccctgacacacccggcacacgcccgcgacacacccgcggcacaccctgacacacccgccacacccggcacacacccacccagccgcgcccccgacacaccccgatcgccgccggtgccgggacagggctcagggggtgttgcgggccgtcagcgctccgccgcttctgcgacgtgttgtccacggcgctttctgcgcgctgccgttgcgtgtggctccacagcacttttcgttccgccagtccggcacgggacagggttgaggaagcgttgcgggacataagtaagcacggcggcgtcctcatcgcgtttgcggcgtgctgtgtccggcgctttgtgcgcactgccggtgcgtggcgtcccgcggtgtttttttttttttttccgcggaccggcgccggggacggggtgttgcgggcgctcgggggttggcggcgggtgtttctacggtgtttgtgcggcgtttctacgcagcttttgcgcggcgcttcgcttttcggggcggcgacggcggtgttttcgggcgtgctgggcgccggcgccggtaacgggagttacgctggggacggggacgggggttgcgccggggacggggggtgtgcggggacgggggggtgtgcgtggacggccacgggggccttttgcggcggggacttgcgggcttttgcggcgggcacagtagtggggacggggagctttggcgctggggacgggggcctcctgcggcagggacggggcgttgcggggccgggggcgtttgcggcggggacgggggcctttcgcggcggacacagtggtggggacgggggactcttgcggcggggacggggacgggggtggcgccggggacgggggcctttcgcggcggggaacacacacggcacgcacacgcagctcgccttagcggtcgccctatcagaaccgccgctactctttattaacgtcttaatccccccgcttctacacgcaacgctgcatacagctatgctcacactctatctcttcacagcgacatgttgcttcgtctatgcgctgccgcgacaagcacaagtggacaccgccatctgccaccacacatggcccatgtgctccgtcgtcccgcatcctacgtcgtctgctcacaacacggcgctttcttccccgcacgccatctccatcgaacaccgtctgctgcattcgccgtcgcctccacgagagaacatacgccacagcatgcgctgtcgccgccgcgacatggcctcctcggcttccacacctgtttcgcacacccaacctctggctgccaaccacagacgttcaacaatcacgtacgcgacgaccgatcccaccaattctccaacggcctcgcccgccaagtcagacaagctggaagccgacgcagacacagcactccatcgacgcccggcctcgctgttgcgccacctcttccagccctgccacgcccaacgcggcacttccaacagagccacatcccagagggcttccttgaacgccgtgcaccacaaactctgcggcgcgatgatctcttcgtcgtgttccaccacttgcacaccgctgattatggacttgccgtcgctgtccgtggaactatctgcaggacacaagaaaaaagaaacaccaaccgagggtgggtggggcggtgaagaaggggaggacgacgttctcgccacgatccgcaacacgttgtccgccccaacctcacctgctgcggctaccacgcatcgactgtcgttccctggagaatcgaccttctgcctcaccgctgtttccgagtgctcacaacgtcgaacatcaacggctgcattaacgccgccgccgccagcggtagctgctgcgttctctttttcgtccacggtctccgagaccggcacttttccgcagagcacaacaggccgcacacgtgtcaacgacaccgccgtcgttaccgccggagacccgcgctctcctgtgacacacgtaactctcctccagatattccgtctgcgtagctcgctgctgacgagcaggtccggcggcgctctccgcggaggtgagcacgaggccatccccaaagtcgcgtcgctgttctggacgctgctcaaagcaacacagatagttgacatgactcacaaaacaccgagtgccgactctcaccgcaacccacaaaaatacaccgaccgcccacaacgcctgctgttgacagcacttgccatctggcaacgaacctacaatgacacgcgtgccgcccacgcgccgcaagtgcgcctgctcggcgacatcctcacttaccgcagaccgcaaactgccaccgcgtctaccaaagcacacacgcagcagcagccagaggaaccaaaaggccaacagatctggacgcagacagccggccaggccgcgccacacggcgacgagccgcatagcgacggcgagctacgccgcgagtcgcattctgcaccgccgacgtctcgtacactacccgatacgattttggcagtgaaacgccgttccgttgcccaacggtcacacgtccgactggacgcgaaacccggactgaatgagcgagacggctttcgccgacggttgttgctccccttatccggctatttccgcgccaacgagctccggaatcaacaatttatgggctatggaacaaagaacggccttaagaatacttggctcacccgccctctgggtgtcgcggggggtgtacgggagacgattggggagcgacaagacaggaacgtggcggactctgcgacgcaacgcattttccacacgttgtacgccgcactgcagaccgtacgggtgtggtataccgcgttaggcaccgcgtggcgtacctcggggtctcgtacgcgtgagtctctgttcgatggtccacgacgtcgcgatcggcaggcgggccggctgcggcgctcggagctgtagccgcccgggactcgtctagccgctgctgccgccgctggtctgcgcctgccgctgcgtaaagtacatcagggccaccagacagactccgatgaagatgacgatagcaacgctgatccaccatctcctgatggcgttgtcgggccaccagggccgttccttggtcttgaccagataggtagtgctggtgacacacttgggcgccgtcatgccgcgactcctccaggttgttccggcagttgcttcggcgggtccctagtcgagggaaacgatccctgcggcggaggaggaagaggagtttccctggagcagcgccgtaggcaagtgccgcggcgcgtgtccgggtggctttataacggccgtcgatgatggtttttaaaccgggacgacggtggttcatgtgaagtaccaggcgacgatgctgaccatgacgccgagcagcagagtgaagacgatgacgttgaacaggatttccagatagtgttccatgttccgcgtggttcctgcgcggttcctgcgtggtttcttttttcctgtgttaacaccggcgttttcgggacggtcggttaacgtgggtttcaggggaaggctgtaagcacggggaaggagcgctgataggcaagacaacgcacgaaggtccaagcggcagcggcgccgacttccaccatcaggccaacgaccagcatccgcagcagcagcgcccaggcgatctcgcgctcgacgacggctacggcaacgaggcagaacatctccacccagacgacaagcgccagaagatagagcacggccggaaagaccgcgggcgttagcatttggtcgcggagaaggaaacaaaaacggttgaaaacggggactgtggagttgctttgttcaggagacgacgacgggagcagacgggatggcgctggatacgctagcggggctggctatctgcgtgggtctagtcatgggggtcaccgtgatcgcgtcgtgcgcgctgctggtgttttattattgcgatgagagggaggatggccgtccgtcgaagctgttgcaacgtagcattcgacgttggcgacacggccttagcaccgaatccttaaccgctatcctgccggacggttcgtccacggagcaggagatctaccacacgcgactttaagtcacggaggaagttacgtgggtaggagggcaccgtgccccgaggcggcgacgggctagcgtataacaagccgcgcgacgacgggcgagcggcggtgagacagacgcgggcacgtcggcggcgatagccatgagttccgaaagcctcgatccctggattcccgtgtgcgtcgtggtagtcatgacctccgtagtcctgttcgcaggtctgcacgtgtacctgtggtacgttcggcggcagctggtggcgttctgcctggagaaggtatgcgtccgttgctgcggcaaagatgagacgacgccgctggtggaagatgccgaaccgccggccgagctggagatggtggaagtgtcggacgagtgttactaggagatcgccgcggccgatgggcgccggcggacgtgactcggcagccgctgtagggataaatagtgcgatggcgtttgtgggagaacgcagtagcgatgggttgcgatgtgcacgatccttcgtggcaatgccaatggggcgtccccgcgatcatcgtgatctggataacatgcgcggccttgggaatttggtgtttggcgggatcgtcggcggatgtctcttcgggacccggcatcgcagccgtagtcggctgttctgttttcatgattttcctttgcgcgtacctcatccgttaccgggaattctttaaagactctgtaatcgacctcctcacctgccgatgggttcgctactgcagctgcagctgtaagtgcagctgcaaatgcatctcgggcccctgcagccgctgctgttcagcgtgttacaaagagacgatgatttacgacatggtccaatacggtcatcggcggcgtcccggacacggcgacgatcccgacagggtgatctgcgagatagtcgaaagtcccccggtttcggcgccgacggtgtccgtccccccgccgtcggaggagtcccaccagcccgtcatcccaccgcagccgccagcaccgacatcggaacccaaaccgaagaaaggtagggcgaaagataaaccgaagggtagaccgaaggacaaacctccgtgcgaaccgacggtgagttcacaaccaccgtcgcagccgacggcgatgcccggcggtccgcccgacgctcctccccccgccatgccgcagatgccacccggcgtggccgaggcggtacaagctgccgtgcaggcggccgtggccgcggctctacaacaacaacagcagcagcatcagaccggaacgtaacccgcccccggtgtgataaggaattttccgacttggcccacatctccttcctcagtgtttggacaataaacacattccttgccaaaaaatgacgtttccagaaatccaaggcataaatgtccgtacaccggcccttcccgacacggagtttgagattccaagcaggagagaagatcatggtgtggatatggctcggcgtcgggctcctcggcggtaccggactggcttccctggtcctggccatttccttatttacccagcgccgaggccgcaagcgatccgacgagacttcgtcgcgaggccggctcccgggtgctgcttccgataagcgtggtgtctgcgcgtgctgctatcgaaatccgaaagacgacgtcgtcgagccgctggatctggaactggggctcatgcgggtggccacccacccgccgacgccgcaggtgccgcggtgtacgtcgctctacataggagaggatggtctgccgatagataaacccgagtttcctccggcgcggttcgagatccccgacgtatccacgccgggaacgccgaccagcatcggccgatctccgtcgcattgctcctcgtcgggctctttgtcgtcctcgaccagcgtcgacacggtgctgcatcagccgccgccatcctggaagccacctccgccgcccgggcgcaagaagcggccgcctacgccgccggtccgggcccccaccacgcggctgtcgtcgcacagacccccgacgccgatacccgcgccgcgtaagaacctgagcacgccgcccaccaagaaaacgccgccgcccacgaaacccaagccggtcggctggacaccgccggtgacgcccaggcccttcccgaaaacgccgacgccgcaaaagccgccgcggaatccgagactgccgcgcaccgtcgggctggagaatctctcgaaggtgggactctcgtgtccctgtccccgaccccgcacgccgacggagccgaccacgctgcctatcgtgtcggtttccgagttagccccgcctcctcgatggtcggacatcgaggaactgttggaaaaggcggtgcagagcgtcatgaaggacgccgagtcgatgcagatgacctgagaccgaaagagcgagcgcgtccgttgtacagttgtatagcagcacacgccttccctctttttcaccgcagctaagagagagaaagagagtatgtcagtcaagggcgtggagatgccagaaatgacgtgggacttggacattggaaataaatggcggcgtcgaaaggccctgagtcgcattcaccggttctgggaatgtcggctacgggtgtggtggctgagtgacgccggcgtaagagaaaccgacccaccgcgtccccgacgccgcccgacttggatgtccgcggtgtttcacgttgtctgtgccgttttgcttacgcttatgattatggccatcggcgcgctcatcgcgtacttaagatattaccaccaggacagttggcgagacatgctccacgatctattttgcggctgtcattatcccgagaagtgccgtcggcaccacgagcggcagagaaggagacggcgagccatggatgtgcccgacccggaactcggcgacccggcccgccggccgttgaacggagccatgtactacggcagcggctgtcgcttcgacacggtggaaatggtggacgagacgagacccgcgccgccggcgctgtcatcgcccgaaaccggcgacgatagcaacgacgacgcggttgccggcggaggtgctggcggggtaacatcacccgcgactcgtacgacgccgccgaacgcgctgctgccggaatggatggatgcggtgcatgtggcggtccaagccgccgttcaagcgaccgtgcaagtgagtggcccgcgggagaacgccgtatctcccgctacgtaagagggttgagggggccgttcccgcgcgagtgctgtacaaaagagactgggacgtagatccggacagaggacggtcaccatggacgatctgccgctgaacgtcgggttacccatcatcggcgtgatgctcgtgctgatcgtggccatcctctgctatctggcttaccactggcacgacaccttcaaactggtgcgcatgtttctgagctaccgctggctgatccgctgttgcgagctgtacggggagtacgagcgccggttcgcggacctgtcgtctctgggcctcggcgccgtacggcgggagtcggacagacgataccgtttctccgaacggcccgacgagatcttggtccgttgggaggaagtgtcttcccagtgcagctacgtggcgtcgcggataacagaccgccgcgtgggttcatcgtcctcgtcgtcggtccacgtcgctaaccagagaaacagcgtgcctccgccggacatggcggtgacggcgccgctgaccgacgtcgatctgttgaaacccgtaacgggatccgcgacgcagttcaccaccgtagccatggtacattatcatcaagagtacacgtgaatgaggaaaagaaaaaagagaggggagcggatcgcgataatgtcgttttgacattctctgctcgatctactcagcgtctgcacgaaacggcgcccgcacggaggcgagcccaagcgtatctgcagcaagcggttctttctctcggtgatggtggcagcatcggtggcgggagcttgttcggacgatggacggtgaggagtccctggcgatcaggcggctcccgggcgtggagttcaacgggtggtaatggtggcggtgatcggtgttaaaaaacggtggccctggcaaacatatatctactgtaaaccctctgctctgttaataaaaagcacacttttcacatgagtccgtaactttattgtgtagtggaaatttttacgtcattaacaaacgggacgatccacgatgtatattgtgtaaacaagaatcttcctgccattacactatcacacgacgtaggcaacattgcgataagtcacacgttacaaatatgcaataacacatatatcattagtatagaatttctatagccgcgataacagtaccgcatgcaacatgacggttgttgttatgttgacgatagccgtcgcggcagttgccatcgtaagcagtaataacaatacaaccaacagtacgacgtgcgtcgatggcacaaacggtacctggtggacagttcagcatgtcggaatgctggctgctggtggatggtcgtgctttatactactattgatgttcgtctgctgcttttgctgcttccagttactgcgtaaactatgcggttgctgcggaaattcacaatccgatagcaaaacaacccacgcgtacaccaatgccgcattcacttcttccgacgcgacgctacccatgggcactacagggtcgtacactcccccacaggacggctcatttccacctccgcctcggtgacgcaggctaaaccgaaaccaacgttgaatctgacgcggtttcggaaagcctgagacgtcactttcacaatgacgttcgtagacacgttgatcataaaacaccgtagaggctaaggcttcggtagggagacacctcaactgttcctgatgagcacccgcgctctcatctcttcagacttgtcatgacccccgctcagactaacgccactaccaccgtgcacccgcacgacgcaaaaaacggcagcggcggtagtgccctgccgaccctcgtcgttttcggcttcatcgttacgctacttttctttctctttatgctctacttttggaacaacgacgtgttccgtaagctgctccgctgcgcttggatccaacgctgctgcgaccgcttcgacgcgtggcaagacgaggtcatctaccgtcgcccatcacgtcgttcccagagcgacgacgagagtcgtactaacagcgtgtcatcgtacgttcttttatcacccgcgtccgatggcggttttgacaacccggcactgacagaagccgtcgacagcgtggacgactgggcgaccacctcggttttttacgccacgtccgacgaaacggcggacaccgagcgccgagattcgcagcaactgctcatcgagcttccgccagagccgctcccgcccgatgtggtagcggccatgcagaaagcggtgaaacgcgctgtacagaacgcgctgcgccacagccacgactcttggcagcttcatcagaccctgtgacgcagatgaacgttccttcttaaacatccgaggtagcaatgagacaggtcgcgtaccgccggcgacgcgagagttcctgcgcggtgctggtccaccacgtcggccgcgacggcgagggagaggcagcaaaaaagacctgcaaaaaaaccggacgctcagttgcgggcatcccgggcgagaagctgcgtcgcacggtggtcaccaccacgccggcccgacgtttgagcggccgacacacggagcaggagcaggcgggcagcgtctctgcgaaaaagggaagaaaagaatcatcatgtgccgccgggagtcgctccgaactctgccgtggctgttctgggtgctgttgagctgcccgcgactcctcgaatattcttcctcttcgttctccttcgccaccgctgacattgccgaaaagatgtgggccgagaattatgagaccacgtcgccggcgccggtgttggtcgccgaaggagagcaagttactatcccctgcacggtcatgacacactcctggcccatggtctccattcgcgcacgtttctgtcgttcccacgacggtagcgacgagctcatcctggacgccgtcaaaggccatcggctgatgaacggactccagtaccgcctgccgtacgccacttggaatttctcgcaattgcatctcggccaaatattctcgcttacttttaacgtatcgatggatacagccggcatgtacgaatgcgtgctgcgcaactacagccacggcctcatcatgcaacgcttcgtaattctcacgcagctggagacgctcagccggcccgacgaaccttgctgtacgccggcgttaggtcgctactcgcttggagaccagatctggtcgccgacgccctggcgtctacggaatcacgactgcgggatgtaccgcggttttcaacgcaactacttctatatcggccgcgccgacgccgaggattgctggaaacccgcatgtccggacgaggagcccgaccgctgttggacagtgatacagcgttaccggctccccggcgactgctaccgttcgcagccacacccgccgaaattcttaccggtgacgccagcaccgccggccgacatagacaccgggatgtctccctgggccactcggggaatcgcggcgtttttggggttttggagtatttttaccgtatgtttcctatgctacctgtgttacctgcagtgttgtggacgctggtgtcccacgccgggaaggggacgacgaggcggtgagggctatcgacgcctaccgacttacgatagttaccccggtgttagaaagatgaagaggtgagaacacgtataaaataaaaaaataatgttaaaaaatgcagtgtatgaagtgtgaatagtgtgattaaaacatgcggattgaatgggtgtggtggttattcggatactttatgtcatccgttgggagcgaacggtcattatcctatcattaccacctggaatctaactcatctgccgatgtagtttgcaacggaaacatttccgtgtttgtaaacggcaccctatgtgtccggtataacgttacgataggaacccttcctgctagtccattttcactagtaggataccttaccattggatatattcaatggtggtttagatcttggattcagaacacaacatacagcaaacacgtactaaccaacaccgaaactctttataatatagatagcgaaaacattcatcgcgtatctcaatattttcacacaagatggataaaatctctgcaagagaatcacacttgcgacctcacaaacagtacacctacctatacatatcaagtaaacgtgaacaacacgaattacctaacactaacatcctcgggatggcaagaccgtctaaattacaccgtcataaatagtacacactttaacctcacagaatcgaacataaccagcattcaaaaatatctcaacactacctgcatagaaagactccgtaactacaccttggagtccgtatacaccacaactgtgcctcaaaacataacaacatctcaacacgtaacaaccactctgcacacaacacctcaaggtacaacaattcaagatacaactcaaagacatactgtacagacgccgtcttttaacgacacacataacgtgacggaacacacgttaaacataagctacgttttatcacaaaaaacgaataatacaacatcaccgtgggtatacgccatacctatgggcgctacagccacaataggcgccagtttatatatcggaaaacactttacgccggttagattcgtatacgaagtatggcgcggtcagtaaatatgattccgattcaacacatatactccccacgatcctcgaacaccttacagcatatgagcaaaaaacaagaaagtataaccacgatcacatttgggcaaataacatgctgtcatccactagcgtctattaatctaatgtttaacgggagctgtactgtcgccgttaaaatgtccatgggaatcaacggatcaaccaacgtccatcagctatgtgattgtgctctacctgggtaatcgctgtcagccttggcgacaggtgtaatcacagctgtcacataactctcgaagcctccaatcacagcagcacacatagtcctaacgccattggcgtgtataaaagttcggaaaacttgacggttgtacggcacgacaaatcgatgtagtggtatgtgtttccagcagggaccgtgtgcggtctcttaggttcgctatactgtggctggaaactggttacctgtgaagatggctgactatcctgttctgtcttggaaaaactttcagcgttgtaggtggactttgcagtatgcgggttagtgaagttatgtcatttatttacgtttacgatctcgtattacaaaccgcggagaggatgataccgttcggccccatgagttatttttattcttccggtaggaggcatgaagcctctggtgatgctcatctgcttcggtgtgtttttactacagcttgggggaagtaaaatgtgtaagcccgatgaggtgaagctgggtaatcaatgctgcccgccatgtggatcaggacaaaaagttacaaaagtgtgtacagagaatagtggcataacgtgtacattgtgcccaaacggtacttatctcacagggctttacaactgtactaattgtactcaatgtaacgacactcagatcacggttcgtaactgcacttccaccaataacaccatatgcgcatctaagaatcatacgtcgttttccagtccaggtgtccaacatcacaagcaacgacagcaaaatcataccgcacacgtaaccgtcaaacaaagaaaaagcggtcgtcatactctagcctggttgtccctcttcatctttctcgtgggtatcatacttttaattctctatcttatagccgcctatcggagtgagagatgccaacagtgttgctcaatcggcaaaattttctaccgcaccctgtaagcttcctgttgttgtttttacatcacggtacgatgaagtcacacagataattacagatgagctgttcatattttttattattttttccaattcctgcactaaaaaaagaagcactttacggaaccgtgtctgaatatctgtggggaatttaggtactttttgccgacgtcaggaaaaataagctgtcgcctacataagagcccggtgctatcgtgctgtcactctttcttgttgccttcgatgtacggcgtcctggctcattactactcctttatcagtagccccagcgttatggttaattttaaacatcataacgccgtgcagctgttgtgtgcacggacccgagacggcactgccggatgggaacgtttaacccatcatgcgtcgtatcacgcgaactatggagcatatgccgtgttgatggctacatcgcaaagaaagtccctagtgttacatcgatacagtgccgtgacagccgtggccctgcagctcatgcctgttgagatgctccgtaagctagatcagtcggactgggtacggggtgcctggatcgtgtcagagacttttccaaccagcgaccccaaagggttttggagcgacgatgactcctcgatgggtggaagtgaagattgatgatgagaacctgacaagaaagacgagagagaaattcagagctgtcattgtagaattagtctagattcctgataataaacagtatcgattttgaaacctaattgacgtgtgatcgatttttaaacctgtgtgttgtgtgattgattggtatgtggggggatccgatttcaaaggggggtacttatcgggaattgatgtgtcatggacgcagttttgagtgattttccgggaataccggatattacgaattactgatagtgacgtagctaataaaattaaaatgcgatttattttcggcctgttagttagtcttgttatcgtgtatacgtattattatgaagtacagagcgtagaattacgttgcccgtgtactgatggtttccgcaatcctttattcggtctatttcttattggtcatgatcctccacatcctcccgtttgtgagagagatcaattttttttgaaacctccccaaggcaagaccgtatgcttgggtccagaacatcacttatcatcatggctcaaaggtcaaaatagtagtttatggcacaaagtactggtgacaaaaaaaggcgatgaaccacaagtacagaagagaggtgagtatcctaagaaccgagcacgtataattgtttagcataatatgaatatatactatagctaataaagtttttacgaaaaaatgcaatgcaatgttttcaacatgttaacatggttacaccattcgattccgaattcgtacgtcaaactcttatcggtacgatacctgtcactgaccgcatatatgttatttgccgcgtgtcctccagtccgtcttttagaactggaagattacgacaggcgctgtcgttgtaacaaccaaattctgttgaataccctgccagtcggaaccgaattgcttaagccaatcgcagcgagcgaaagctgcaatcgtcaggaagtgctggctattttaaaggacaagggcaccaagtgtctcaatcctaacgcgcaagccgtgcgtcgtcacatcaaccggctattttttcggttaatcttagacgaagaacaacgcatttacgacgtagtgtctaccaatattgagtttggtgcctggccagtccctacggcctacagagcctttctctggaaatacgccaagaaactgaactaccaccacttcagactgcgctggtgatcatgtccctattttaccgtgtggtagccctaggtacgctaagcgctctggtgtggtacagcactagtatcctggcgaagatcaacgaagaatcctgctcctcgtcttctgtggaccacgaagagtgcgaggaaccggacgagatcgttcgcgaagagcaagactatcgggctctgctggccttttccctagtgatttgcggtacgctcctcgtcacttgtgtgatctgagacgtcatgctggtagcgtttatgagtcgggcggtggccgacacgccgcatttcctaacccgcgcagcatgttgcgcttgctgttcacgctcgtactgctggctctctacggaccgtctgtcgacgctagccgcgactatgtgcatgttcggctactgagctaccgaggcgaccccctggtcttcaagcacactttctcgggtgtgcgtcgacccttcaccgagctaggctgggctgcgtgtcgcgattgggacagtatgcattgcacgcccttctggtctaccgatctggagcagatgaccgactcggtgcggcgttacagcacggtgagccccggcaaggaagtgacgcttcagcttcacgggaaccaaaccgtacagccgtcgtttctaagctttacgtgccgcctgcagctagaacccgtggtggaaaatgttggcctctatgtggcctacgtggtcaatgacggtgaacgcccacaacagttttttacaccgcaggtagacgtggtacgctttgctctatatctagaaacgctctcccggatcgtggaaccgttagaatcaggtcgcctggcagtggaatttgatacgcctgacctagctctggcgcccgatttagtaagcagcctcttcgtggccggacacggcgagaccgacttttacatgaactggacgctgcgtcgcagtcagacccactacctggaggagatggccttacaggtggagattctaaagccccgcggcgtacgtcaccgcgctattatccaccatccgaagctacagccgggtgttggcctgtggatagatttctgcgtgtaccgctacaacgcgcgcctgacccgcggctacgtacgatacaccctgtcaccgaaagcgcgcttgcccgcaaaagcagagggttggctggtgtcactagacagattcattgtgcagtacctcaacacattgctgattacaatgatggcggcgatatgggctcgcgttttgataacctacctggtgtcgcggcgtcggtagaggcttgcggaaaccacgtcctcgtcacacgtcgttcgcggacataacaagaaatccacgtcgccacgtctcaagaatgccggccccgcggggtctccttcgcgcaacattcctggtcctggtcgcgttcgggttgctgcttcacatggacttcagcgacgctacaaatatgaccagcagcacaaacgtccctactagcaccagcagcagaaataccgtcgagagcaccacgagtagcgaacctacaaccgaaaccaacatgaccaccgcccgcgaatcttccgttcacgacgcgcgcaatgacgaaatcatgaaagtgctggctatcctcttctacatcgtgacaggcacctccattttcagcttcatagcggtactcatcgcggtagtttactcctcgtgttgcaagcacccgggccgctttcgtttcgccgacgaagaagccgtcaacctgttggacgacacggacgacagtggcggtggcagcccgtttggcagcggttcccgacgaggttctcagatccccgccggattttgttcctcgagcccttatcagcggttggaaactcgggactgggacgaggaggaggaggcgtccgcggcccgcgagcgcatgaaacatgatcctgagaacgtcatctatttcagaaaggatggcaacttggacacgtcgttcgtgaatcccaattatgggagaggctcgcctttgaccatcgaatctcacctctcggacaatgaggaggaccccatcagatactacgtctcggtgtacgatgaactgaccgcctcggaaatggaagaaccttcgaacagcaccagctggcagattcccaaactaatgaaagttgccatgcaacccgtctcgctcagagatcccgagtacgactaggcttttttttttttgtctttcggttccaactctttccccgccccatcacctcgcctatactatgtgtatgatgtctcataataaagctttctttctcagtctgcaacatgcggctgtgtcgggtgtggctgtctgtctgtgcgccgtggtgctgggtcagtgccagcgggaaaccgcggaaaaaaacgattattaccgagtaccgcattactgggacgcgtgctctcgcgcgctgcccgaccaaacccgttacaagtatgtggaacagctcgtggacctcacgttgaactaccactacgatgcgagccacggcttggacaactttgacgtgctcaagaggtgagggtacgcgctaaaggtgtatgacaacgggaaggtaagggcgaacgagtaacgggtaggtaaccgcatggggtgtgaaatgacgttcggaacctgtgcttgcagaatcaacgtgaccgaggtgtcgttgctcatcagcgactttagacgtcagaaccgtcgcggcggcaccaacaaaaggaccacgttcaacgccgccggttcgctggcgccgcacgcccggagcctcgagttcagcgtgcgactctttgccaactagcctgcgtcacgggaaataatatgctgcggcttctgcttcgtcaccactttcactgcctgcttctgtgcgcggtttggacaacgccctgtctggcgtctccgtggtcgacgctaacggcgaaccagaatccgtccccgctatggtctaaactgacgtattccaaaccgcatgacgcggcgacgttttactgtccttttatctatccctcgctcccacggtcccccttgcaattctcggggttccagcgggtattaacgggtcccgagtgtcgcaacgagaccctgtatctgctgtacaaccgggaaggccagaccttggtggagagaagctccacctgggtgaaaaaggtgatctggtacctgagcggtcgcaaccagaccatcctccaacggatgccccgaacggcttcgaaaccgagcgacggaaacgtgcagatcagcgtggaagacgccaagatttttggagcgcacatggtgcccaagcagaccaagctgctacgcttcgtcgtcaacgatggcacacgttatcagatgtgtgtgatgaagctggagagctgggctcacgtcttccgggactacagcgtgtcttttcaggtgcgattgacgttcaccgaggccaataaccagacttacaccttctgcacccatcccaatctcatcgtttgagcccgtcgcgcgcgcagggaattttgaaaaccgcgcgtcatgagtcccaaaaacctgacgccgttcttgacggcgttgtggctgctattggatcacagccgcgtgccgcgggtacgcgcagaagaatgttgcgaattcataaacgtcaaccacccgccggaccgctgttacgatttcaaaatgtgcaatcgcttcaccgtcgcgtacgtattttcatgattgtctgcgttctgtggtgcgtctggatctgtctctcgacgtttctgatagccatgttccatcgacgatcctcgggaatgccagagtagattttcatgaatccacaggctgcggtgtccgaacggcgaagtctgctacagtcccgagaaaacggctgagattcgcgggatcgtcaccaccatgacccattcattgacacgccaggtcgtacacaacaaactgacgagctgcaactacaatccgtaagtctcttcctcgagggccttacagcctatgggagagtaaaacagagagggacaaaacattaaaaaaaaagtctaatttcacgttttgtaccccccttcccctccgtgttgtaggttatacctcgaagctgacgggcgaatacgctgtggcaaagtaaacgacaaggcgcagtacttgctgggcgccgctggcagcgttccctatcgatggatcaatctggaatacgacaagataacccggatcgtgggcctggatcagtacctggagagcgttaagaaacacaaacggctggatgtgtgccgcgctaaaatgggctatatgctgcagtgaataataaaatgtgtgtttgtccgaaatacgcgttttgagatttctgtcgccgattaaattcatgtcgcgcgatagtggtgtttatcgccgatagatatggcgatattggaaaaatcgatatttgaaaatatggcatattgaaaatgtcgccgatgtgagtttctgtgtaactgatatcgccatttttccaaaagtgatttttgggcatacgcgatatctggcgatagcgcttatatcgtttacgggggatggcgatagacgactttggcgacttgggcgattctgtgtgtcgcaaatatcgcagtttcgatataggtgacagacgatatgaggccatatcgccgatagaggcgacatcgagttggcacatggccaatgcatatcgatatatacattgaatcaatattggccattagccatattagtcattggttatatagcgtaaatcaatattggctaatggccattgcatacgttgcatctatatcataatgtgtacatttatattggctcatgtccaatatgaccgccatgttgacattgattattgactagttattaatagtaatcaattacggggtcattagttcatagcccatatatggagttccgcgttacataacttacggtaaatggcccgcctggctgaccgcccaacgacccccgcctattgacgtcaataatgacgtgagttcccatagtaacgccaatagggactttccattgacgtcaatgggtggagtatttacggtaaactgcccacttggcagtacatcaaatgtatcatatgccaagtacgccccctattgacgtcaatgacggtaaatggcccgcctggcattatgcccagtacatgaccttacgggactttcctacttggcagtacatctacgtattagtcatcgctattaccatggtgatgcggttttggcagtacatcaatgggcgtggatagcggtttgactcacggggatttccaagtctccaccccattgacgtcaatgggagtttgttttggcaccaaattcaacgggactttccaaaatgtcgtaataactccgccccattgacgcaaatgggcggtaggcgtgtactatgggaggtctatataagcagagttcgtttagtgaaccgtcagatcgcctggagacgccatccacgctgttttgacctccatagaagacaccgggaccgatccagcctccgcggccgggaacggtgcattggaacgcggattccccgtgccaagagtgacgtaagtaccgcctatagactctataggcacacccctttggctcttatgcatgctatactgtttttggcttggggcctatacacccccgcttccttatgctataggtgatggtatagcttagcctataggtgtgggttattgaccattattgaccactcccctattggtgacgatactttccattactaatccataacatggctctttgccacaactctctttgttggctatatgccaatactgtcattcagagactgacacggactctgtatttttacaggaaggggtcccatttattatttacaaattcacatatataacaccgtccccagtgcccgcagtttttattaaacataacgtgggatctccacgcgaatctcgggtacgtgttccggacatgggctcttctccggtagcggcggagcttccacatccgagccctgctcccatgcctccagcggctcatggtcgctcggcagctccttgctcctaacagtggaggccagacttaggcacagcacgatgcccaccaccaccagtgtgccgcacaaggccgtggcggtagggtatgtgtctgaaaatgagctcggggaatgggcttgcaccgctgacgcagatggaagacttaaggcagcagcagaagaagcaggcagctgagttgtgttctgttgagagtcagaggtaactcctgttgcggtgctgttaacggtggagggcagtgtagtctgagcagtactcgttgctgccgcgcgcgccaccagacataatagctgacagactaacagactgttcctttccatggatcctttctgcagtcaccgtccttgacacgatggagtcctctgccaagagaaagatggaccctgataatcctgacgagggcccttcctccaaggtgccacggtacgtgtcgggacttgtgttcccctttttttaataaaaagttatatctttaatgttatatacatatttcctgtatgtgatccatgtgcttatgactctttctaatgtgtttaggcccgagacacccgtgaccaaggccacgacgttcctgcagactatgttaaggaaggaggttaacagtcagctgagcctgggagacccgctgttcccagaattggccgaagaatctctcaaaacctttgaacaagtgaccgaggattgcaacgagaaccccgaaaaagatgtcctggcagaactcggtaagtctgttgacatgtatgtgatatatactaacctgcatgggacgtggatttacttgtgtatgtcagatagagtgaagattaactcttgcatgtgagcggggcatcgaggtagcgataaatgagtcaggaggacggatacttatatgtgttgttatcctcctctacagtcaaacagattaaggttcgagtggacatggtgcggcatagaatcaaggagcacatgctgaaaaaatatacccagacggaagagaaattcactggcgcctttaatatgatggggggatgtttgcagaatgccttagatatcttagataaggttcatgagcctttcgaggagatgaagtgtattgggctaactatgcagagcatgtatgagaactacattgtacccgaggataagcgggagatgtggatggcttgtattaaggagctgcatgatgtgaccaagggcgccgctaacaagttagggggtgcactgaaggctaaggcccgtgctaagaaggatgaacttaacagaaagatgatttatatgtgctacaggaatatagagttctttaccaagaactcagccttccctaagaccaccaatggctgcagtcaggccatggcggcattgcagaacttgcctcagtgctcccctgatgagattatggcttatgcccagaaaatctttaagattttggatgaggagagagacaaggtgctcacgcacattgatcacatatttatggatatcctcactacatgtgtggaaaccatgtgtaatgagtacaaggtcaccagtgacgcttgtatgatgaccatgtacgggtccatctctctcttaagtgagttttgtcgggtgctgtgctgctatatcttagaggagactagtgtgatgctggccaagcggcctctgataaccaagcctgaggttatcaatgtcatgaagcgccgcattgaggagatctgcatgaaggtctttgcccagtacattctgggggccgatcctctgagagtctgctctcctagtgtggatgacctacgggccatcgctgaggagtcagatgaggaagatgctattgcagcctacactttggccaccgctggtgctagctcctctgattctctggtgtcacccccagagtcccctgtacccgcgactatccctctgtcctcagtgattgtggctgagaacagtgatcaggaagaaagtgagcagagtgatgaggaacaggaggagggtgctcaggaggagcaggaggacactgtgtctgtcaagtctgagccagtgtctgagatagaggaagttgcctcagaggaagaggaggatggtgctgaggaacccaccacctctggaggcaagagcacccaccctatggtgaccagaagcaaggctgaccagtaaactattgtatatatatatcagttactgttatggatcccacgtcactattgtatactctatattatactctatgttatactctgtaatcctactcaataaacgtgtcacgcctgtgaaaccgtactaagtctcccgtgtcttcttatcaccatcaggtgacatcctcgcccaggctgtcaatcatgccggtatcgattccagtagcaccggccccacgctgacaacccactcttgcagcgttagcagcgcccctcttaacaagccgacccccaccagcgtcgcggttactaacactcctctccccggggcatccgctactcccgagctcagcccgcgtaagaaaccgcgcaaaaccacgcgtcctttcaaggtgattattaaaccgcccgtgcctcccgcgcctatcatgctgcccctcatcaaacaggaagacatcaagcccgagcccgactttaccatccagtaccgcaacaagattatcgataccgccggctgtatcgtgatctctgatagcgaggaagaacagggtgaagaagtcgagacccgcggtgctaccgcgtcttccccttccaccggcagcggcacgccgcgagtgacctctcccacgcacccgctctcccagatgaaccaccctcctcttcccgatcctttgggccggcccgatgaagatagttcctcttcgtcttcctcctcctgcagttcggcttcggactcggagagtgagtccgaggagatgaaatgcagcagtggcggaggagcatccgtgacctcgagccaccatgggcgcggcggttttggtggcgcggcctcctcctctctgctgagctgcggccatcagagcagcggcggggcgagcaccggacctcgcaagaagaagagcaaacgcatctccgagttggacaacgagaaggtgcgcaatatcatgaaagataagaacacccccttctgcacacccaacgtgcagactcggcggggtcgcgtcaagattgacgaggtgagccgcatgttccgcaacaccaatcgctctcttgagtacaagaacctgcccttcacgattcccagtatgcaccaggtgttagatgaggccatcaaagcttgcaaaaccatgcaggtgaacaacaagggcatccagatcatctacacccgcaatcatgaggtgaagagtgaggtggatgcggtgcggtgtcgcctgggcaccatgtgcaacctggccctctccactcccttcctcatggagcacaccatgcctgtgacacacccacccgaagtggcgcagcgcacggccgatgcttgtaacgaaggcgtcaaggccgcgtggagcctcaaagaattgcacacccaccaattatgcccccgttcctccgattaccgcaacatgatcatccacgctgccacccccgtggacctgttgggcgctctcaacctgtgcctgcccctgatgcaaaagttccccaaacaggtcatggtgcgcatcttctccaccaaccagggtgggttcatgctgcctatctacgagacggccgcgaaggcctacgccgtggggcagtttgagcagcccaccgagacccctcccgaagacctggacaccctgagcctggccatcgaggcagccatccaggacctgaggaacaagtctcagtaagtgaaaaactggaaagagagacatggactcttgtacatagtgattccccgtgacagtattaacgtgtggtgagaatgctgtttaataaaagtagcttttttttatacatctccgtctctggtctcgtgatgtgggggtgcgggtggtcccggatacttgtccttctccccctcatgtgtatagccctgatggcgagaggcacatacggggcttacatctgctcacccaacccagggagacttagaatctcttgcgccctctcggtgttggaccaaagactgtggtgggagatccagtattcatcgggtcgtctcacccgagtcttggtctttcatgatgacggtgaggagggtgatgacttacatctcacggatacccgtcactgcacttcctgtacacatccctatgtgatttctttggttaccccgctgaccatcaatgccacgctacggctgctgatacgagatgggatgtacgggcggggggagaaagagttgtgcatcgtccatctacccaccctgcgagacatccgcacctgccgcgtcgacgccgacctaggactcctatacgccgtctgtctgatcctgtcgttcagcatcgtcgcggcggccctgtggaaggtagattacgacagatccgttgcggttgggtccaaaagctataaatcatagctactgacgcaggcacgtcattgacagccggcgacgtcgagagggtaactatgtaccgtgcgggggtgacgctattagtggtggcggtggtaagtttggggagatgggacgtggtgacggtggcggctgcaattgggtggtatgagccccaagtgagcatggcttatatgtatgagcataatgacactaacctgactattttttgtaacactacagctcgcaattcgccctttttggcctcgggaatgatgatcagtattccacataacacacgatttctcactagcaaagtcaactatagtaatgacatgaataatatcaggaaaaactatacccaccaactgacatatatgctaacgggtgatccgggaacctacgtgaacggcagcgttacttgctggggctctaacggaattttcggcgccgggactttcctagtgcaatccatggttaacgacacgaccggtaacaccagtacatccatccactttgttcaacagaatgaactggtggagaatcccgcgtactttaggcgcagcaatcaccgagcctttatgattgtcatactgacgcaagtggtttttgtggtcttcattattaacgcttcttttatctggagctggacgtttaagcgtcacaagcggtgacgcggccccctgccacatatagctcgtccacacgccgtctcgtcacacagcaacatgtgtcccgtactggcgatcgtactcgtggttgcgcttttgggcgacacgcacccgggagtggaaagtagcaccacaagcgccgttacttcccctagtaataccaccgccacatccactacgtcaataagtacctctaacaacgtcacttctgctgtcaccaccacggtacaaacctctacctcgtccgcctccacctccgtgatagccacgacgcagaaagaggggcacctgtatactgtgaattgcgaagccagctacagctacgaccaagtgtctctaaacgccacctgcaaagttatcctgttgaataacaccaaaaatccagacattttatcagttacttgttatgcacggaccgactgcaaaggtcccttcactcaggtggggtatcttagcgcttttccccccgataacgaaggtaagtagcacctacctttctgttcaaccccttttcctccctcgtcaacctgatatcaaaataaacattaattttatccgcaggaaaactacatctctcctacaacgctactgctcaagagctgcttatctcgggactcaggccgcaggagaccactgagtacacgtgctctttcttcagctggggccgccatcacaacgccacttgggaccttttcacctatcccatctacgccgtgtacgggactcgcctgaacgccaccacgatgcgggtccgcgtgctgcttcaggaacacgaacactgcttgctcaacggtagcagcctctatcaccccaacagcaccgtgcatctgcatcagggcgaccagctcattccgccgtggaatattagtaacgtgacgtataacggacaacggttacgcgagtttgtcttctacctcaacggcacgtatactgtcgtgcgtctccacgttcagatcgcgggccgaagttttaccaccacctacgtgtttatcaagagcgacccgctgttcgaggaccggctgctggcctacggcgtgctggctttcctggtgttcatggtaattattcttttgtacgtgacctacatgctggcgcgccggcgggactggtcctataagagactggaggagcccgttgaggaaaagaaacacccggtgccctacttcaagcagtggtagggcccgaaacgagaggagcggctgctgtgttgtctttatttcgctaacttctacggggtttcccctcagcctctgtgttcccaacccgtccccccgctgagcgttggcggcgatggtcatgttctcccaggaccacgtccagatcgtctacggctccacacgcatctgcaagtccctggccccggccaacaagagaaagacccatcgcaccatcgtggtagcgccgcggcggggttttttgcgtattcccccggacgggcaggacgttaaccacgtcaagatcgtacccaccaccacctcctcctccctcgcgccgccccgtgacgacgaacggcggccgatcccgccgttgcggccgccgctcacagtctatccctatggcacgtcgctgatccgcaggtcagctagggacgcaaaactccgctccaagctaatcgtcttccatataactcggcccgcactcggtcagcacccgcagaatcccgggatctcgggccctacggccatggatcatagtgagttcctcaccagctttcgtcgcgaggtcgatcggcaaaccgtactgaccgccgagagcgcgcccgccactgtggaagtctgtctgggcgacgctctgcccggcggcgtcatgggtagcggaggactgccggcgggtgtgggctcggccagcgccgccgtggccgccgctgccgccgctgtggccggagtgcccgtcgccgcaaaccccgtcatgcccgccaccgccacggtcaccacgccgcccatgatcgaccttaccagccaccaccggccgctgacgctatttacgccggcctccgcggccgctgcgcccgccgtggccaccaacggcggtaacgccacctacattttgccggccgactgtcggtacgcgccactctttgccagcaagtataagtacgtcttcgaagaggtgtcacgtctcatgcggctgcacgactccacggccgtgcagctgcagatcagcgcctcgtgcggcaacgctttccaggccctcaagagtgccctgctcaagttgcacaacgtcaccgtgttagcgggccagcagctcatcacgcagacgatgccgcacacgccacaggccgtagccacgttcaaattctttcaccaggatcccaaccgcgttctggactgcatccgtccggtggtgccgcgctccacttcgtaccacgagacgggtgtgtaccagatgtgggtctcgggcgccaccaagaaagacctgtttgacgccgtgaccctgtgcgcttccatcgtagaaaagcagccagacgtatttaatatcaacgtcagcttgttgacgtacccttcgatcgcggcgccccacttgccgctgtacaacgaattcaccagctttcgcctgcccacctcatgaagcggcggcggcgatggcggggctggttgcttttcctggccctgtgcttttgcttactgcgtgaagcggtggaaaccaacacgaccaccgttaccagtaccaccgctgccgccgccacgacaaacactaccgtcgccaccaccggtaccactactacctcccctaacgtcacttcaaccacgagtaacaccgtcaccactcccaccacggtttcctcggtcagcaatctgacgtccagcaccacgtcgattcccatctcaacgtcaacggtttctggaacaagaaacacagggaataataataccacaaccatcggtacgaacgctacttccccctccccttctgtatccatacttaccaccgtgacaccggccgcgacttctaccacctccaacaacggagatgtaacatccgactacactccaacttttgacctggaaaacattaccaccacccgcgctcccacgcgtcctcccgcccaggacctgtgtagccataacctgtcaatcatcctgtacgaagaggaatctcagagcagcgtggacattacggtgggtgaagaagagtcggagtcggaagaggacgacgacgaagagtacgacgaactgtggttccccctctacttcgaggctgagtgcaacctaaattacacgctacaatacgtcaatcacagttgtgattacagcgtgcgccagtcgtctgtctcattccccccgtggcgcgacatcgactcagttaccttcgtacccaggaacctctccaactgtagcgcccacggtctggccgtcatcgtcgcgggtaaccaaacctggtacgtgaatccgtttagcctggctcacctgctggatgcaatatataacgttttagggatcgaagacctgagtgccaactttcggcgccaactggctccttaccgtcacactctcatcgtgccgcagacttgatgtgccgccgcccggattgcggcttctctttctcacctggaccggtgatactgctgtggtgttgccttctgctgcccattgtttcctcagccgccgtcagcgtcgctcctaccgccgccgagaaagtccccgcggagtgccccgaactaacgcgccgatgcctgttgggtgaggtgtttcagggtgacaagtatgaaagttggctgcgcccgttggtgaatgttaccggacgcgatggcccgctatcgcaacttatccgttaccgtcccgttacgccggaagccgccaactccgtgctgttggacgaggctttcctggacactctggccctgctgtacaacaatccggatcaattgcgggccctgctgacgctgttgagctcggacacagcgccgcgctggatgacggtgatgcgcggctacagcgagtgcggcgatggctcgccggccgtgtacacgtgcgtggacgacctgtgccgcggctacgacctcacgcgactgtcatacgagcgcagcatcttcacggaacacgtgttaggcttcgagctggtgccaccgtctctctttaacgtggtggtggccatacgcaacgaagccacgcgtaccaaccgcgccgtgcgtctgcccgtgagcaccgctgccgcgcccgagggcatcacgctcttttacggcctgtacaacgcagtgaaggaattctgcctgcgtcaccagctggacccgccgctgctacgccacctagataaatactacgccggactgccgcccgagctgaagcagacgcgcgtcaacctgccggctcactcgcgctatggccctcaagcagtggatgctcgctaacattgctgataataaaggctctctgttaacccccgacgagcaggctcgcgtgttttgtctgagcgccgactggatccgcttcctcagcttgcccgaccacgacacggtgctgctgcgcgacacggtggcggcggtggagggcgcgcggcaactcgagatggtgtacccggcacccgagcacgtacaccgctggagctatctgtgtccgcccgagcaggtgcgcgtggtgatcgtgggccaggacccgtactgcgacggcagcgccagcggcctggcctttggcacgctggcgagccgaccgccgccgccctccctcaacaacgtgtttcgcgaactggcgcgtacggtggacgggtttcagcgtccggcctcgggttgcctggacgcctgggcgcgacgcggcgtgctgctgctcaacaccgtgttcaccgtggtgcacggacagcctggatctcaccgtcacttaggctggcagacgctgagtaaccatgtgatccggaggctgtcagagcgccgggagcatctggtgttcatgctgtggggcgccgacgcgcacacctgcgagtacctgatcgaccgacggcggcacttggtactcaagtcctgccacccgtcgccgcgcaacaccacccgcgccttcgtgggcaacgaccactttatactggccaacgcatatctggacacgcattaccgagagaccatggactggcgactctgtgtgggtgattgatgataatagacacaccggggagacaaggtggtgaactgtgatgtctatctctttattgtaaaaaaaaatcagtgaccacaatatatatagacacacaccgaaaggggtggaaacccaaatgtccaagcgcgtcctgtttcataatttttccggtctcggctctgttttttaatcgtcgaaaaacgccgcgatcgaggcggcggcgatcgcagcctcctcgctgggatcgataatttcgagtccgtcctcgaggaacgagggccctcgccggcggccgctgccggcgacttgcgacaaccggagcagaggatcgttgtcctcgtcctcatggcggttgtttctccgtcgcgatctccgagaggaggaggacgacgacgatgcggcctgccgccggctgtttctaccaccgccaccaccgccgcctcctcgggtattgttccgggcccgaccccgacgtccgcccggcggtggtggtggcggcggcagtggagccgaagaagacgaggaagagttactggcagccgcggcggtggcgacaacggggtttaccacgtagggcttgatttcacacacgggccggggaggagcagctggtgtttcgactgcggcggcaacgggcgcgacaccggcgacggaacctgagggtacaacaccggtggtgacgagtggcggacatgcggctgctggggggccaacgccggctgtggagacagctgcggcggtcctcgcgacgctgctgtggttgacgacgacagtcccgcccgacgtctctggcaagagtctgctggaaaccagggggagatcgcacaatcttttctccttacaatcattgagcattttggtcaatgactgtataatgtcatcaaaacgcggactgcgaggaggctgaggcgccgcggattcctgcgaattcggaggaacacggcagttagagactggagtggtggaatcattctcctcctccgactgcggtggtgcctccgccgcctcagccggagccctcctcatcctcatcatcattaaccccgcagccgccgccgtcgccgccgcctcggactcctgcaccgtctcgcccgcgctgtgggcgctgctgggtcgagggagcgaaagaagtgacgacggcgacgtcgacgacggcgacgaaaccaccgctccgcgctcaatgggtagaagtaacgcaccgtcggtgccggcggccacgtccgtcacggcgttatggtggtgatgatggtggtggtggttgttggaggaagaagagaccgcggaggatgaagacgagtaattgagaaaggccaccgcttcagacgtgtccagcggcagcgacatgcggccgctgccgccgccaccaccaccgccagcaccaccggactgctgctccgtctcgttcttgccgccgccgccatggccttcgtgctgtgcggtggtcttttgtctcttcgcctcccggaggggaggagagcctacagacgggacgacacatagcgcacgaaaaagcacatggttatcatccacacaaccaccagcgcaccaacaccgctcgcctgctcgctcgtgcgctacgggggggctcacgagtccactcggaaagcaccgtgacgcgaggagggccgggactcaccgtcgttctcggaggagggaggcggccgccgctccttctgccggttcatcaaccggggatcccgcagcagtccgttggcggagtccgaggagtgctgaccgccgctcccgccgccgccaccgccaccaccagcgccgccgcctccaccaccaccggcagacgaggacgattttttgcgccgttcttcgtgacgctgttcctgccttcgccgttgctgttcctccgcagaagggccgtcgcgagtcccgccgctgccacccagcgaggacacgcagacggcggaggcggtagacgcggcgccgcaaccaccgcctccgccggaggattcgccgtggtttttcaggtaatgccgcacgtaagtcacttgcaaattaccgttttcggaaatcatagtgagcagcgcgctctcattgggtccgctggagcccaccaccgaggagacggatttgttaaagacgataccgccgcgtacaaagaggtgctcctgaagttccccgtcgcccgtaatgtcaatggacatgaagccctgctgcgtcttggcgccggccgaagcctcgccgtgctgcataatggtagcgcagagccagcccttgttgaggtgcagcaccttgccatcgccgtccacgcagttgaccagacgggcgttgtcaaagacgaactggcgcacgtcgaaagtctgattaacgctctgatgcaggatgcggttaggattcgtaaaagtccagtattttcgcacgacggtagtaggcagatccatgacgcggcggcgcaaagcgcgagcgcaacgctcgtcggaggccgtggagcgagtgccgccgcagccggcagagcgccgaaccccgtcgcagactctatttatacatcatctttccagcccgcctagcaacacccacaaacaacgtcacgacgcaacgtggttaaacagtacgtttattaaagtaactgggtgaacaacaccggagcggactgcaaatcgcaacgctactttctcgagtgcagatactcttcgagacggctaaacaacgtgtccaactcgctgagacctttccgcgtgccgttatccgatttcctttccgcctcctgagacagccgactaatcacggacttatctccgcaacctaacagaggctgggagcccgacaaaagtaaaacagcgtgctatgaacacgttgttacctctgcgcggacagcgccgccacagagacacttacgcattgccgcatgtctttgtagatggattctagcgtcgagcgcatactatgcaattccgtcttaagtccgggatagacgtggtcgcctgcggggaacacgatctccagataccgcctcaacaaccagtccatgacgctgcatccccaacagcctttgaccaccgtaccgtcgagccacacggagtagtcgtcctcacgttgttacaagaggaaaactacgtcacccgacacgcggaaaataaagaccgtcgcaataaaccgtacctacgtgacctaccaacgtaggttttactcgatgaaaggtgacgcggagatcttgcaatctggtcgcgtaatcctctggacgacactgcggctttgtattctttatcgtcgtcgtcgtcgttgccggcttcgcctcctcggaagcgcctagaaaaaagacgatcaggaccagagaggaagagaccatcaccgacagcatcgccgcagcatgccgccccaatccgccgcccaactgcgcgtcccaggtaggtggtcctttatgttatgatgtttttgtcaattttttttttcaatttctttcttccgcggttagaatagtttctgtaggaaccaattatcaatctgacgggttatcgtcaccacttgatggcaaaacgaaatttttttttcattgccttgaagtctctcccgccaccaccaccaccgccgccgttgtctccggctggagatcaagacgaaattcctcctctctaaaaaaaaaaggtggtgggctcaattgatcatggcaagaagaaaaactatactgaataaactgtgtgcaaaactactagtaacaacaaaaatagcgactagatacaccacggacaatctcagcagatactctctcaaaagaaaaaaagacgccgtaacgtcggagaatctggtatctactgcctgacgaatttttttttcgtccatgtatgtgattacgagtagtagtggtatgtagaacaagaagaaaaatcgtagtccccaaaaggataataaaaataacactcatagagaatcacagattttctctagacaactctctatccaaataacgaatgtgaagcgtacaaagtaagatattcaaagaatagcaccttcatagattcatttcagctttctactccttgtaatttaaagttgcactaaacaaagctcttaaagaaggttcgagccgctctcgatcactcatcgatcacgcgagtcttattattccaccacaacgtaacattcttcactttgtagagacactctatcgtagagtaaccctcgatttcctagctgttgttttttgattattttgttcgctctaagagagatactcgaaatcctacttacaccaaggaccctacatcatcgcaggaagaataaacataccgtagaaatctcgacacgcaaacgcgaatgtacacgaaccaaaagccacagacccactatttctgtgccgtatttttttttgacaatctgtctgaatctgcggaaatagttacggagaagcaattctgttaaaaaattcagtacgttagcagcaaaagataatcatttcgtgtgatagcaagtaaatcacctcacttaggatcgatttcgtgcgaaaaaattattttttctcctaatcaacagataatatggttaccatttagagtagtgtcactttactttcacggaagatgcaacccccgagaaaaagaagaatcgatcatagataaaagaaatcaagccagacttgttaagaaaaaaaaaagatcaaaaaattactacctaaaaagaacgcctagccattgggagacgcgcacgtctgtgtggtctccgcgatcatgagaacgaaaaaaaagacacgacaatacacaggctgaccttcgaaaaccaagcctattgataataatctaccccatagaacaggatataatcaagcatccaaacaacaaacagcgccgccgtgcctcctccagaggacggtgacgacgtatgtctgtcgtctcccttctcgctctggcttctggggctctcctcctctccccatcatcttctccttcgtcccagacggacggctatcggttcgcgcgctcgtcttttcttcgatgtgcgcaggtttcgtcatcggagaagaagaccgcgaccgtatcataatgatgataataataatacatccaccgaccatctttatcctcttttgttgttccaaagagaaaagaaaaaaaaaacaagcagccactctaaccatcacactcacgagttaatatggggttaggggggaggaagagaaataccgccatgaaggcaagagcagcagcagcaacgacgtcactacgatgattgatgatgatacacgactaccactggaggagaggaaaacggagaaaactcatcgtgatgatggaaacaagaatgatgataataatgatgacgataaagccaccacacgatatatacagagaacaacaaaaccaccaccacgacgatgaaacaaaacgctcaaccaaacattgtgtaaccgctacgcgtccgtggccgcggccggcggcctcttgtcttgtttttgttgtccccttcgcgggggacatcatcgccgccgacccgcgtgtgccctgcctcacggctggtccgtgatgaactcttgctcgtaaccgccaagcgataaacaagccaccgtgatagaagacaccttataggaccatatcctagttacatagtagtgcatatatatagtaatagtagaataagtgaactttagacacgatagatgaagccatagtctgaatagtcatgatgttaggaacactatacgactaatacatacatacatacacccccttaggaggaacgatgaatcaaagaataatacatcatgtagcataagtacattaagcctttaaacgaacaaattgctaaccaaaatcgatcaccaccatagacgtactatcatcattacaacgaaaaactagacggatggatagctgtaagtctcacctagctaactaacgatcacattttttctccacgatagtcaccacaaccatgaatgatagccgcctatttgaagtttgatatctcgatgaatctctatagtcatagcccgttctttttttccaagtatcctttagtccataagcattattataaccgtattacccagaaatctttgttatgagtctcttcgctgtcaactgattagtagcaagttgctgtgattttttttccaatcccataggcatccttagttaaaacattaagaagtaagtaggttctggatagctaatcatcttttttttttacttcggtagattaaaacaaatgaaacacgtagctgttgttttttggtgaatatagtttggtaagtccttagcgggtaagttctaagaaacattagttactttttattgttctgtctcctctccccctaccttacgttgggaggtagcttcgtcatgtaggataataattaggtaagcaaacaacatagatagtgattttagtatagataactcgtgtaagtgttttagtgacttgtaactcgactcggtagacttctcagagtttcgcctcacacaggcgggtacactcgttaagaaacgcaaaatacctaaaagggtacgttacatagcagataagttgatagatgaccgatattatacttcattaactcacgaagatgactgtaagtaaggatattgttgttcatgatagtagccaggttataaggatcatatatatctcgtcagggaaatacaagttagaccataatgttgactactttagagataataagacaccataggattctgaatttaccatgatataagttaagaagattgatatctgtcctttttctgaaacgaagataggcctttttattttttcgaattcatgttcgaaaacacaagcttccataacaagaacccgtaccgaagaaaagttccatcgactaaaaagaaaaaagaaaacgaagcaagacctcgacgacaacaacacatcaaagaaagacgaccagctgattatgttcttaggaattccacacacccgcgagccgatccgcaaacgtcgtgcgaggcgcgctttctctggctcgacacaatgatcacaccgcacgctatagacacgtcgtcgtggacgacgatgacctcaggccacgaatgacaaccaacatgggcaaagtccaattagccaaaaagacgacgattctaagaattgatgaatcctcgatatacgcctatcgataggtttcaattgtgtcatatacatcaaatgaaaaacaggacgcacgataaaagcttccttacagcataactgtaacatacgatcatcgaacatctcctcacatacctttctcctctcacataggaaaacaaaactcttttttttctttcctgtcaaggaaaaaatcaatgtaccaccacatcactttctgctcggtcccggcgacggatgggcgcgcacgcggacaaagacccaccggccacttccacttattttttgttgttaatcgtcttctcccccgcacgcggagcaccaccaagcctagctgctcattcgctcaactagtcacaccgcgcacgcgagaaggggccggggtccgcgggcaccgccgccggaggcgcggttccctctctctaattccctggaaaacaagtaatgacaaacaaaaagacgacaaaaggtctctattctgctacatgagagaaattatagctgttggcaatttttcaaaatacatgttataaggcatcctctctgccacacgcgcagtcacggataggatcagtgcgtattcattataaaaaaaaacacaaacaacccatatatgtgaagcagaatgatgaccgaccgcacggagcgacgccgtcgactgacccacgcggcatgtacgccgtccgcgaacaaccaaaggacgacccgtctccccccgcacccgggttttttctcttggtcgaacccggcttgcgacgacgggttgttcctttaccggacgacggtcagccgcggggttgatacccagcgacggcgtcgctcccacccgggtttctttctcttgtagataccactcgtagactgtcagcctcgcgaagagacaccgcggaccggggaaacggataagtttacgaacagaaatctcaagagaaagacgctgacccggcaagtaccgtcacggagacacggtggtttttattgaatttccagtgtatcgagccaccgtgatgcaggtacggtggttttatgtgaagtgccgctatctataggcgatgtgttccctgacggtgtgtgttttttttggggatagacaacgtggttcttgtacgtggtttttaccctgctcaataaagtcacgttttccttacacggtgttgtgtcaaaaaataagcgtggtgcgtttgtctttgagcgcgcgacagatatagggggtgatagcggtgttcttctcatagggaagtcgcaacgggttgacgttcatcatgaggtgctcggggtccgtgactcgcgacatggccacgtagatgtggctcatcttgaggttcttgggatggtccccaaagtccacggccaccttctcgagcgacaggccctgactcttagcgatggtcatggccgtgcgcgaagtgaggccgtagtccacggtggtgcacacgtgcagactcttgccctgcgccgactcgacgaagcgcgagacgttaacgtcgagcacaaagaggaacccgagcgcatcgcgtagcaccagccgcgaaagaccgcgctgcaccacctcggggtggatgcggtggcggtcactgggcagactgagcacgttgtcgctggtgtagccctcgagcgtgtacgtctgcgccggcgacacatgcgaaagcatgcccacgaaggagccggtttgcgagctgatctgacagttggccttgaacaccacgttacggcgattgtaggtaacgagcggcaacgtggcgaagcgaccgcccgtgagacgctgcatgagctggtagcgcttgagaaaaatgtcgcggaaggtagtgtacatgtgcaccgtctcctcgaaagaaagcagtgccaggctaggtggcttgacgtatttgagaaaaaagggatccgcgtacagactggtgtgatccatgagttcggcgtccgtgatggcgtccgagtcgtcatggtggttggacaggcaggggatgtcgtgggtctcctcttggccatgttccatccgttgagataccggcacgctctggccgccctgagaagaatccgcgtcgacgtgattatttatcagattctctcccccgctccaagcgggagcggcggccgtggcggcggcagcggcgcagagcgaactcacgtcgggcagctcaacgcgcgccagctcacgcaacatctcctcggtcgtgtagggcgacacgtaaaagtagtacatggccgagaagagcaggcccgaaactaacgagtaggcgtaggccgcctgctcgcagggcgtgcgttcgataaacgtgtccttttgcaagatgtccacgaaacgttcgaccgtgccctggtatccgataacacaggcccgcaccttagagttgactcccaccgaactgcccttgatgtaggtaatgcgcaaggtgagcagcgtctcacggctatcgggcgcggtggtggtatcatcgtcctggaaaaacgccgtctcgtcgttgccgccggtgctcccgattacagatcctccccctccgtgagcctggacggaggggttgttggtggcaacgacgtcggccgcggggcgcagcgcctccttggtgatctcgctggagaggttgtggtcgacaaactgcgagtagttaatgatgcgcgccaagttctggcggaaccagagctcgacgggctgcggcgagtcgcccagcgggtcggccagctcgcagagctcctggtacgcgcggttgttgaccacgcagtagacgggcaaatcaaagagacggtggcgctcgctcaggcggatctgctcgtgcagccgcttgaagtaagcctgcacctcgacgtgcgagagaaaaagccgcgtcatctcggcggcgtacgagggattgcggatggagctgggcggccgcacgaagcggtccacgtaggccacgtgctcctccttgagcgggataccgaactccatgtacttgagcaggtcgccaaagtccaggtcggtgcaacgcttgttgtgaataaacatgacccagttgtcggcgatgtcgcagtagttgatgagcacttcgttctgaatcagcgccgagagcacgtcaacgcccttgcgcacgctcttgttttgcgtgtagtggtcgtagcggctctccagcgcctcggtctgcgtgggcgaaccgacgcagatgatgcagggcacgcggcgttcgcggtaaagtcgcgtgtcgcccagggcgttgtaaaagtagtaaaaaaacaccaccacctgcagcatgtagcgcagcataaggccgcactcgtcgatgacgatgatattgctctcgcacagctccgagaggtcctcgcaggcggcggccgcggccgcggcggaggccgaagcggccttgcgctcccacatatttaagcatttgtccacgatgtcggcgatgaccggccagtaggcgagcagatcgttgatctgcaggcgctggatggtggtctcctcgtgcggctcgcacacgcggtagcgttccagcgtctcgtggctaacggcgctgtcagccagcggcacgtgcttgctgacgaagccgaagacgcggtagatggtcttgacctgcgctgagcgagtgcggttgaggatcgcgctgaggttctgcgcggcgatcaccgtggtaccggtgatcacgcaatctagattggccgccagcacctggatgctggaagtcttgccggcgcccgccgtgccggtgacgagcagcgcgcggaagggaaagaagggccaacggtcgacgcagggcacgcgcgtgccgccggcctcggacgaagcggcagcggcggcagaagaggaggcggaggagtgaacggtcgccgttgccgcggcggtagttgcggcagaggggttgttatctgtcgttcgttcaacgcgactgatggagcgaaaccactggaacgaaaaatcctcgggcgcaaagcgctcgcgcgagagggacttgaccttgtcgacgatccgttcgatcttggcggccgacgagaggttgaggatcaaggcgtcgtcgtacttgggcgtgggccgcggcgtggatgacgaggccgtcatcgacattttccccacgggccagacgatgagcttcctgcggttgctgcacggctttctggggacgtgtcgcggccagagcatgcaccaggtgctgcgcgacccgtgcgtgctgcgcaagcagctgctctacggagtgtgcaagacgctctttgacaccatcacggtgcggcgcgtggccgaggagtggaagttacacgcggcgttgtttccctaccgcgcgctggacgaagaggacctggagcagtatctgttggtgtggagcgcctcgttgcgccagagcgtgcaaacgggcgtgctgggcgcgctccgcgacattttatatcagtacgccgataacgacgactatggtctctacgtggattggtgcgtaacggtgggactggtaccgctgctggacgtgaagaccaagccgaacgaggcggccgagcgggcgcaatttgtacgcgcggccgtgcagcgggccaccgagacacacccgctggcgcaggacctgctgcagactaacctggcgctgctgctgcaggtggccgagcgcctgggcgccgtgcgcgtagccaacgcgcccgaggtacgcgtcttcaagaaggtgcgctcggagcggctggaggcgcagctgcgcggcaagcacatccgcttgtacgtggcggccgaaccgctggcttatgagcgcgacaagctgctgttcaccacgccggtggcacacctgcacgaggagattctgcgctacgacgggctctgccgccaccaaaagatctgccagttgctcaatacctttcctgtgaaagtggtgaccgccagccgccacgagctcaactgcaagaagctggtggagatgatggagcagcacgaccggggcagcgacgccaaaaagtccattatgaagtttttgcttaacgtctcggacagcaaatcgcgcatcggcatcgaggacagcgtcgagtcctttctgcaggacctgaccccctcgctggtggaccaaaaccgtctactacccgcgcgtggtccgggtggacccggcgtggtgggacccggcggcgccgtggtgggaggacccgcgggccacgtcgggctgctgccgccgccacccggcccggcggcgcccgagcgggacatccgcgacctgtttaagaagcaggtcatcaagtgcctggaggagcagatccagtcgcaggtggacgagatccaggacctgcgcacgctcaaccagacctgggagaatcgcgtgcgcgagctgcgcgacctgctcacgcgctacgcctcgcgccgcgaggactccatgagcctgggcgcgcgcgacgccgaactgtaccacctgcccgtgttggaggccgtgcgcaaggcgcgcgacgcggcgcccttccgtccgctggcggtggaggacaaccgcctggtggccaacagcttcttctcgcagttcgtgcccggcaccgagtcgctggaacgcttcctcacgcagctgtgggaaaacgagtatttccgcacctttcgcctgcggcgtctggtcacgcatcagggggccgaagaggccatcgtatactccaattacacggtagagcgcgtgaccctgccctatctgtgtcacatcctggcgctgggcacgctggaccccgtacccgaggcctacctgcagctctccttcggcgagatcgtagccgccgcctacgacgacagcaagttttgccgatacgtggagctgatttgcagccgcgagaaggcgcgccggcgccaaatgagccgcgaagcggcgggcggagtgccagaaaggggaactgcctcgagcggcggcccaggaacgcttgaaaggtccgcgccgcgccgcttgatcacggcagacgaggagcggcgcggcccagagcgtgtcggccgatttcgaaatggaggccctgatgatccgcggcgtgctggaggtccatacggatttcactagacagaatgtgatgatcatggagccgcaagtgctcgactttacggtgcgcggcgacaagctgtggctgcatacggagcacgggctgctggtttccatggccgagtaccgcagcgagttgctgtgcacctcggcctttctgggctactccgccgtgtttttgctcgagaccgaagacgccgtcacgcaggtgaggctctcggatctgcggctcaaacaccgctgcggcatcgtcaaggccgacaacctgctgcacttcgcgctctgtaccgttatttcatgcgtggaaaattgcaacttaacgcgcaagtgcctgcacgacctgctccagtacctggacgcggtgaacgtgcgcgaaagcttcggccggctgctgcaccacagcgcccggcggctgatctgcagcgcgctctacctactctttgaggaaaaagaaccgcacattgtgcagtacgtgcccgctaccttcgtgctcttccagcagacgcggcatacctgcctgcagctggtagcacgcttctttttccgccttaccggtcaagacgaggcacactcgtttagcctcaagctgaccgagcgtaagaccgtggacggttggcccgtgggcctgggcctgctagacgtgctcaacgccaactaccccaatttgccctcaccccccaagctgccaccgcgctgggaacggggagaggaagagtgagaagcgaactagacacgcatatcatagaaaaaaaaacacgcaacacgtagtgagctttgacgtcccttttactagtatccacgtcacacgctgagaactttgacgcacttttttttactagtatccacgtcacttacccacgtagttctcctacgtgactcgttaagcgttgagccggaaaaaccgcaggccctcggaagccacccgcttagcagcgtgttgcgcgtcaaccgccagcgagcgcacccactcgtcgcgctcctcgagccaagttgccgacgaagaagaacaagacggaggagacaccgtcgccgtgcccgaagaggacgaagtgacggacggcaaggcggaggagagaacggaagaagaagaacaagtggtggtggaagcggtggaggacgacaataactctcgcgcccagacctccacgcaagccgtgagcatggcaaaggccttgtccacatagacgccgtagccgatatcggccgccaacgccgtatcgcgtgactgtacgatgatctggccctgctcggcccacacgccgtggaagggcgcgcaatcaatcaccccagcgtgcggccttacttcgttttcaccgggctggaagcgcagtaaccaaaagtccacgtcgttgcggcgagccacgaagcgaaagaggatctcgcggtacacggcttccagctcggacacgctcacgcgctcccgtaacagcgccggcagccggcccaggacatgacccacggccgagagccagtcgccaccggccgcgcagcaacagccacctaacgccgcgggcggcgtggagggagaaacccgatcactaccgccgttatgaccactcccggcagcggcatctagaccgccgccactcgcgtggtccgcgtcgcccacgccactaccaccgccgccgccgccgctagaatggcggtgagtgacgacgcagcccgcgcaacaagcgccaccgcaatgtcccgccgcgaaatcacccaccaccccgtggagcggactaccaccggcgccgccgttgccgtagaagaagttgaagggacccaccaaccgctcgtcgccccagaccaacagcacgccgggcgcgctctcttgaacacgacaggtgggacccggatcgtcgccgccaaaaagtttgcgccaataacagtcgaccacagtccgcacgcacacttcggccgagacgggtccgtgacccgaatagccgtcgtagacataaaactcgcggtggccacgcgacagaacccacaaaaggccggccgaagcgcaggctgacgtaacgtgctcggagatgtagcccagcagactctggatctgccagaaggcgcgtcgcgagcgaaaacgcagattttcaataaacttttcacaaaccgcataagtgtggagtcgatgactataacgcacgtagggattgaagtcgcgcgcgcgtacacacttggccagcacgcgctcgaccaaatccacgatgagcactcgatgtagcgtggcgtcgcgaacgtgcacggtgaaagtagcgtcgtcgctcggcgggtgcgcaccgccggtgctgctgctgacttccacgacgttgttttcaccgtcgccgtcgtcacgcggcagcggcggcaacagccagcgacgatcgccgccggccggtcgctcgcgaaaagccgtggcattgagacgcacggcgccgccgccggcctcggtgccgaagacctgccactcatcctcgggcacgccgagcgagagcgcgcagggttccacctccagcttgccggccgagcccacgatgtcaggcaggccgcaccacgagagcacctcagccgccgcgtccaacgccgtctcgcgcattaacgtgtgcagaccgtggaccgcgtagacgggcacgggcgggaaaccgggaaaaaagaaagaacgggcggcgcccgtctcaaagaggtccggccccaggtagtcgcgtagcggcggctgcccagcgaaaccacggaaaagcacgtcgtaaaggtgagtccaggccgactgcagcaataaacaacactgctcgtcggtcactgccacggccacgaaaccgacgggcgtgaccagacgcagacaggtgcgcaaaaaacacacctcgcgcacctcaaagaggcgtgccaggacggcctcgtcgtcgcgctccagcacgtacttgtgagtgccgacgcgaaacgacatggccaaatcgtaggcgtagtaaccgcgacgcaattttttgtgcgcgtgggtgccatactcttcggagacgcgttccgcggcatgcgtgaccacacgcggctcgtgcacttcgggatacgagccgatgaccactagcttggctacgtggaaaagactaagcgcgttcgacagcgctgcggtttccacgcccagtgccggtgcggcctccaaaatctccacaccgctagcgtccgtctgaatctgcaccggcgtgaaggtgcgcgccaacacgcggattaacgcgctgccttctagcaacacgcgcgccaacacggcgctacgctgctctaggccgcgccggcgctcgtcggcgtccgtagtcacggccgaggccagcgcggcgtagctggcgcgatgcacaacacgcacctcagccggcggcagacggtcaccgcgcaccacgaacgtgtgaagccgcggctcggcacggccgccacccagatccaaaaacagacattgtacgataggcaccgaggcctccagaaggccgtaccagctgagatgacagctggtcccgaacagggtgtacgggtggtggcggtggtgcaacggcggctgagcggtcatcctcggacagaagagagtcgcgaaggcccgcggggtcttttttcgtcgaccgcccggacgtgctcaaaccgcgtcgtgagccgcggcggctcccatcgtagtatttaacgacccgcgagcctgtcgtcatcggcgcgcccccatcgcctcccgagcgagcgggccgccgctatcgccatggccccctcgcacgtggataaggtgaatacacggacatggagcgcttctatcgttttcatggtgctgacttttgtcaacgtcagcgtgcatctggtgctgagcaattttccgcacctgggctacccctgcgtctactatcacgtcgtggactttgaaaggctcaacatgtcggcctacaacgtaatgcacctgcacacgcctatgcttttcttagactcggtgcagctggtgtgctacgccgtgttcatgcagctcgtctttttagccgtgaccatctactacctggtatgctggatcaagatcagcatgcgcaaggacaaaggcatgagcctaaaccagtcgacacgtgacatttcgtacatgggcgacagcctcacagccttcctcttcatcctcagcatggacacgttccaactattcacactgaccatgtcatttcggctgcccagcatgatcgccttcatggccgccgtgcactttttctgcctgaccattttcaacgtgagcatggtcacgcagtaccgcagcttcaaacgctcgctcttttttttctcgcgtcttcaccccaagctcaaaggtacggtgcagtttcgcacgctcatcgtcaacctggtggagatggcacttggtttcaacaccaccgtggtagccatggccctgtgctacggcttcggaaacaactttttcgtgcgtacaggccacatggtgttggccgtcttcgtggtctacgctatcatctccataatctactttttactgatcgaagccgtcttttttcaatacgtcaaagtgcaattcggctaccacctgggcgccttcttcggactctgcggcctcatctaccccatcgtgcagtacggcgcctttaccatcggcgacgattaccgtaccggcatcagctggtcgttcggcatgctctttttcatatgggccatgtttacgacgtgtcgcgccgtccgctactttcgcggacgcggtagcggcagtgtcaagtaccaggcgctggccacagcctccggcgaagaagtcgctgcgctcagtcaccacgacagcttggaaagccgtcgcctccgcgaagaagaggacgacgacgatgatgaagacttcgaggacgcttgaccccgccgccacccgcaccagacttggagacatggacataaaaaagagacacgcagaccgtgggtcgggagcacatactttttttttattaaaggtttatctgttcttccaccagctactttacgtgtttcaaacagcacattagacacacgggggcgcaaacacacacaaaaaaaataatatacacacggagaaacacccacgggtgtcccattcccgactcgcgaatcgtacgcgagacctgaaagtttatgagttaaaagggcaagggggcggcgggcttttttgtcccgggggtggatggacgttgtgaaatcttcttttggcgcggagtcctgggtgtgtcgggccgcggcagtcgcttagccaccacctggacgggggggaccgggggcggggacaggtaaattgaggtgtcctcttcgtctaagtcgtccgtctcctgcataatggagctttgctgatggtggtgatgttttgagggtttctttttcttttttgactgcttgctcggtttcggagccttgtcctcgcgaaacgtcgagcgcaccgcgtttttcttggggccgtcgtgggtggcctcgcggtggctgccgctactactgtcgtttcccccgcagccactaccgcacagccgcagcttctgttgccgctcctcgttatcgtcatcctccccgtcgtcatcgtcctccccttcgtccgaggaggaagtcggagggatgttgtcgtaggagcgtagagacacctggcgacccagagcatctttcaggggctcaccggacgtggtaccgaactcacaacatattcgtttgcagagttcggcacccatatcggtaggttcgtcttgcgggacaggtcgcgactccaacggtctaacacggtagagacggcatggcgcgtaaactgagggtcaaagaccacgggcgtgacgatgagcaggagcgggatgtggtcgcagtggaaaacgcgaccgccggccagcaactcgcagcccagttcgctttcctcgcgctcgcggaagatagccgagaccaggtagacggtaggcaggtcgcggaaatcgatccgctccgggtccggatgcttctttatatagtattggctgagcacgtactgctgaatgagcatctgaaagtaatactggtgacgcggattgacaaaagccggcagtgaaaagcgcgctacctcgtacacgttgagccggcccagcagctcgggcgtgttttcgtcctcgaaaggtatcggcggcggcgaatcgcccgggctgccccgcaggtggtgatcagcgccgccgccagcggcgtcgcccgcggctaggccgagactcgcgttaatagtgatcgtggcgtccccgtcgctgttgtcgtcattcaggtgcttagcgtcaaacacgatcacttccgaacactcggccttattgagatacagcagatcggccaggtactcgcgcagcggttcgggcggcttgagcgggcgcgcgcgcttgagcgtggccctgaagagcgccgcatcgtgcgaaagcagaaactcgcgtgccgacggggtttcgcgttcaccgcgaaactccacgcccggcaccgggtgtgactgcaacagcgaggccacggccgccgcgtcgtgcctccgcagcacgttctgcacaaaggggtcctcctttttgcgcaaatatttgtagcggcacttgatctcgtagacgcgcgcgcacggttccaccagcaaggtgcgaccgctgccctgcttgagcacgccgaagcacaggtccatggaagcgcccagcagccccgacgtggggtcgatgagcagaccgaggccgtcgcgcaccggctcgcgtccgtgcatcacgtaacattccaccagcgttttgactaagccctcgtgtttgataccgaactggatgcccggcgagacgccggcgcgcgagcccgtgtagtgcgagccgccgccacccgaaccgtccgccgccgcggcgccgggcagacagccgctgacgaaggcctcgtagaacttggtggccgagaccgtgtccatacgcaacagatgccacaccgagttgcgcgactgtccgcgtgattccttttccagcaactggaagagctcgacctgccgatagttgggcgccaaatccagcaaccggctgagccacacgtagtcgtccgagccgccgtgccggtcgtcgcaccgctcggccacgcgctccagggcctcggcgatctcggcgcgcgaggcttcggcggcgtgccgctgacccaaaatgtcgcgcagaccctcgtcgcgagccagcgcggccacgcgcgtcataaagtcctcggctactggcgtaccgtgggcccgcagcatcttggcgaagatgcggtaggcgtaagacagacgcagcaccgtaaagggcagattacggaagccctcctggtgcagcaaaaaggtgttcatgagaaagagactgagaggctcatcgtcccaaaccgccagcagccgggtgagctcctcatcgtcgtcgtagtccaaactcgagacgccccacatgatgatggcggcgcctcagtattttccccgccggtgggtttgtaccttctctgtcccctttcccctcggcaaccgtcacgttccgcgtcccggttactcggggaacagttgacggcagtcaccgtcaaggtcctcctcgcagattatgctggtggtgcgccgaaaggcgttatataaatacagcccgtcgctcgtggccaacagacgctccacgttctttctgacgtattcgtgcagcatggtctgcgagcattcgtggtagaagcggcgaaaggcgcgtacgcgacacgaggacatcttggcctccacaaagcgtagcgtgtgcgacaccagcgcggcgccatgctcgcccaggagacaggcgccgtagctcatttgcgccgccagaatgagcagacaggcgtcggagcagtgcgtgagcttgccgttctccaacgcgcggcaggccgcgccggcgtgcttaaagagcaacgcctccgtacccatgcgcacctcgtccagaccgcgccggtccaacagccgcatgaggcaaaagcccagcacgttacccagcgccgacaactccgacatgcaataacgccgtaggccggctacggggaaacgcgcgtgcgggtcgcagatgagcagcttctgcagcggcatgggtcggaaagcagggtggtaacattcgcgcagacggtgcgagcagttggggatgcggcgcgccgtgcccgtctcctgaaagacggccacacagcgctcgttgtaatccggatagggctcgctgaggctgtaatcgcacagcgcggcgcgcacgatctcgctggggttgtgcgggttcacgtcgatgagcacgttcatgggtgtaatatcaaagtggcatacacgacactggtgattgagaaatttgatagcgtcggccaacgtgcaaaaggcacgtcggtagctgtcgatgcacgccagcttccactggtcgtgatgaaacatgtctgtgtggaaacgtcgatgtactgtgacgttgtgcagcagacagcagcccgtggccgtgagcagaccgcggtgcacgcccgtgcccaccagcgacggcggctgctgttgctcgccagcggcgcgcgtgcggatcaggcccgacatccagaccgtgagcaccgtctcgctgtgcttacgcgccaccttgaccacgcgatagcgatcgagcggccagacctcgccgaaggagccctggcccaggcggtagctctcgtcgctcatgtccacggcataacagatcttgtggcaaaaatcgtcctctttgggcacgtagaccagcaggtaggagatagagagctcgcagagctcgggatgcgtaaggcgcaagaacatacgcgggtcgcacgtaaggccgcggatggacgtggtgatgatctggtcgttggaacaggtgcaatgcacgtcgtcgtgtgacgtggagtcggcctccaccgccgtggcggattcctccccggaactaccgctgagcggctgcggaacgcggcccgggcccgatgccacggcgctgtcctgactttccgcgcgcagctccacgtcgttttcttcgagcaccgcgtccacgccgcccacacgacgtcggcacagcggggtgcgggccagcgacaccaacggcggacgcaacgggcgtttgcgtccaccgcgaacgccgctcacgctgtccgaggggtcgctgccgccggtgaagagagcgcggcgtacgctggtcacgtcgccgtcgcgatcgtactcgaacgaccacatggccgaggtttcgcggcagcgcaagccgtggtaaccgtcgccgctggcggcgctgccgcgagacgacgtggacggcaccacgggccgacgctggttctccttgtccgaagccgcgtcctctttttctccgtcacgcatcacgtcacttcgaacgcatgcggaaaaagtcgcgtgtccaagcacggtggttgtgctgacggaactcagggtggtcaaagtggtgacgccgccgccggcctcgtcggccatcagatccacgacctcgtcttcatcgacgtgagcctgggcaacttgagcggcggcggcctgcgcggcctgtaccgcggcttgagcggcggcctgcgcagcttcgcgcatccactggcgccggcgcgccctgctgggacgacgcaatggcggcggatcccagccctgagtcgtcgttccgagcgaggccgagcgagcccgagaccgaagtgcggaggacatagtggcgacagtcttccctgttcctagggctgcactagctaccacaccgacactgtcgttatggtgtgtttttttttttaataaaatctgaacagaggcgtgacggggattgctatacctgttagacggcgtcgtcaacctccaggtccaaatcgcacgtcgccgaaaccgagtccaccaaggtggctctcacgtcgtctaccgtgtccttcagctcggttaaagagtccagcgcgtcgtccacgttaccggattgcagctgtcgggcgcgttgcaactcttgctgcacggccgcccgttgctccaacaggtgtgcggccacgcactgcgtcgttcgctgactgtatcgggtctgttcccgagcggccacacgcatcaccgtcaaagcctgctgcgtggtgagccggtgctgcggtccgtaggtacgccgcagaaactgatgctgctgtcgctcaaggtcgacgcgcatcacgtcctttaagagctgtttgttgaccgacgtcatagattcaacgtgatgagacccgcgtcgttcagcgagagagcgtccagcaacttgccgacgtggtagacggggaaaagcgagacggtgctctggccgggcaagatgtggctcaaagtgacgtcggtaacagccgcggcgcagtcttggataacgatggggctataactcacggtccgcgcctcgtcacgcgcgagatctaaacagagacggttctgactgtagagcgcgcacaacaaacaggtgcgcgacgaggccggccaggcgggcacctcgcgccccgagaagcggccgcgcaccgcctgtaacacctctctgagacggtccagcgagacgggctttaaaggcaaatgcacctcgtcgccggcgtcatcgacccggcctgctgacgcgctcgtctcgaccgcacaagcgccggccccgccgccgccaccactaccaccaccaccaccaccacccgccgtcgtcgcctgcggcgttggcgcagggaattcgtagccgcgataccaaacaaagacgtacagctcagccagattcatgtaggtcatatagtcccgcacgggttcgtaaaagagtttgggcaacaacgcggggaaaggacaaccgttcttttcgcgaccgaaacaggtgtcacgcgcgcaaaagctgcgcggtccacagtacagcagccacagcagggcctccacgtcgcacacgttgtgatgatctaacaagcccggcgtgtacacctgtcgcagcacggcttccacgtattgcaccttgttgctggagagtgacagctccacgtgagccttgcgatacaacaggtaactgccgtagattaattcgccgtcgtaggtaacacggtcagcattgcgtaacgcataatcatgcacacaaagcgacggcaaaggctcagccgcggccgcgaaacgctccagcacgtcgtgtcgacgtagaaaagacggcgtggcggcgtcgtttttcggagcgcgtcgtctacgacggcgtttggcccgagacccaccgccgttcttttcccccgcggttttattcccgacgtttttctttttgtcctccggcccgctatcgccaccgctgctactgctatccaacaccggcacctcggccgactcgcgcggaattacgttggtgaccaacaagaaattctcgtcgggcgtttcaattaggcgaaagcgatcgtaaggtgacacggcctcgcaggccaccagcgccatatttacggcctcctcgaagcgccaagcctcggagaccgagaaatcggcggccggagactgcgccgacagctcgaccatccgttccaccgagcacagggacgtcgaaaccccggcggaccccggagacctgacggcagttgagggagaggagacggggaaactgagaggagaggcggaggaagattcgtctgagcctgacgccgaggaagacgacaccactagggacgacgaagacgaacgagtgacggcgcccgtcccacaagccacgtccgcgacaacgtggttttcgggtggatcctccgtcgtcctcgcggacgccatctttttcctctcctctcgccgctgccgcctaacctccgctcgcactaccgccgccgccatcatgttgcgcggagattcggccgccaagatccaggagcgctacgcggagctgcagaagcgcaagagccaccccacctcctgcatctccacggccttcaccaatgtggcggcgctgtgccgcaagcgctaccagatgatgcaccccgaactcgggctggcccactcgtgcaacgaggccttcctgccgctcatggccttctgcggccgccaccgcgactacaactcgcccgaggaaagccagcgcgagctgctgtttcacgagcgcctcaagagtgcgctcgatgaactgacgtttcgcccgtgctccgaggagcagcgcgcctcctaccagaagctggacgcgttaaccgagctctaccgcgatccgcagtttcagcagatcaacaacttcatgaccgactttaaaaagtggctcgacggcggcttcagtaccgccgtcgagggcgacgcaaaagccatccgactcgaaccgtttcaaaagaatttattgatacacgtcatcttttttatagccgtgaccaagatccccgtgctggccaatcgcgtgctgcagtacctcatccacgccttccagatcgacttcctctcgcagacctccatcgacatctttaagcagaaagccaccgtgttcctggtgccgcgacgtcacggcaagacttggttcatcatccccattatctcgtttctgcttaagcacatgatcggcatcagcatcggctacgtggcgcaccaaaagcacgtgtcgcagtttgtgctcaaagaggtcgagttccgctgccgccacaccttcgcgcgcgactacgtggtcgagaacaaggacaacgtgatcagcatcgaccaccgcggcgccaagagcacggcgctttttgccagttgctacaacaccaacgtgagtagctccatgatgataatatacgccttgccacaaaccgtggcgaatccatgtcctcttttttttttgttgtttcttgtttcttctccccgtgaactgtcagaccccgttagtgcactaggttcttaagcaccggacaggaacacactatcatacgtgacacaggttcctctaccttgaccaggtcccacacatcggtcttgacgggcaaccatcggccctcagaatccttgacaccgatgtgataatccaggccgtctcccagtgtgacctgcgccgcggtcttagaacctacggcgcataggtacttggcgtcatcgctctcacagaaaaaagtcgcgggttcctcgttgtggatgagcgactgcgtcatgggcccacagggcacgtaacaaagacagcggcccatatcgggggtgcaacccacgtaattgccagtgggatctacatgtccctcgtgatccgtgcaaaagctgcaacccgcctgcccgcaggccgtggccgccgccatgagccgcgtcatggaagggatatcgcaccgattgccgcatgaggtaaacaggtcgtagcacagaatgtaaaagaaaagcgtgtagccttcaggacgcggcagcaaccaggcgccggcgccgcctagcgtcactgccttctgacaggtcaggtccatggcaccgtgacccttgaccaggatgcgcttggcttcatcctggggcaccaacatgcagacctcgtaaatcacgtcgggcgtaataccatcgcacgtcatactgctggtcacctggctaaagcttggcaagaaatcaatgctggctggacccaaaggacctccgaagctcagttggtacaaggtaggtaaatgacagatgcgtcgacgacgccgatgtacgtggcccacgccatagtggccttgataacggccgttgcagcaaagacagaggatccattcgccgtcgcggtagagcaacagcaattggcacaagatacacgagccgtcgtcctccggactaaagatcgtcgaacggcaagcgacggcccgatactcgcggtgtttccggctcttgccgaccagcttccacatgcattcctcttgcaagaactgcttcaaagttctggaatcggtctcgcaaagcccgctgcgccaagccatgaagagtgacgcgcgaagagacggcaaagccgcccggcagcacccagtaaaagtccaagtctggcgtgacgtagaacacgcacacctcgggctgcgagagccaacgtcgcaggcgtccgcggcgatcacggacgatccaaagcccggtgcgaggacaacgcgccgcgcgcacttccacgcccaaatccacttgcgcgcgaacgcagcgcaccacgtcagcgtaccaagtccgttcggcgggcggaccgctctcgttccgcggtccgaaaagcagctcctgcggtttgggcgccgagcgctcgcgctgacgacgagctcgctgagcggcagcggcggcaccccggctcagacgaggcgttagcgccttaataatacagctacgcacgtccgcccgatccatccagagcgccaaggcatgacggcaaagttcccaaacaacgcgccaggacatgttccgtggcacgtggcaggcgaaacgctgtggcaacgcgccgctgtcccgtcgtagtacagcgtagatctcgtcgcgcacggcgcgaatcagcacgtactcgacggcgatgcgcgcccgataagcgtccaacgcccggtatagttcgacttcgtggtcatcgtagctcagctcgcgactgcgccaaaaggaattgacgtaccacagcacacggaggcgcacgcgatgctgcacatcccagacctcgcggagacgcgagacaccggcacccttccactcgtccgtacgcgcgacctcgtcgcggtcgtgcggatcggtggcgtacatgaggtctggatttacatccaggcgcagctgcaccaactcatgaccgcgtatcttggaaggcggctccaatggacccgcgtgatagatgaattcctcgtcgccgcgcaacaaacgcgctacccgctgctccaggttactgaatctgccgccgccgttcgcggaggagattcctgctccgttcggaatttcaaaaaatggagtactgacggccgtctccagagaagccacagccgcttcgggcaaacggcgatccgacccattgtctaagttattacgcagtccgccccgccgacggtgattcgtggtcgtggccaactggtgctgccggtcgcgcttattcgcttccatttcttctcgtaacaggtcacgcgctaaaaactcccagtcacgatagctgccgtcgggccagaccagtctcaggtgtagcgtctgcgcgcctgagagccgattatcggggcagcgcagacccaacgtagtgaagacggcatagaacatgcgcacgcgctgctctttctctaacgtcacagtgagaccgctttgacgtaggtaatcgagcaactccagtgggcgcggtagtacacgaaaacaggcccgctgccaagtccgccgctcgcggtcaaaagcgcgatcgccgcccacggcgtcctcggcgtcgtcggaggccggtgcgtcgtcctcatctccgcccggagcgcggcccgcggatcggccagcgctgtctacattacgatagtagacgtagcgcagcgtctcggcctcctcgttactcagcacctcctggtcgagcaccaagtgtagaggcaattgctcatcgtcagcgaaccgcgcctcaaacgccagatccgaatacaggtgcgtttccatattcggaacgcatctgtttcagaagcgcgtcctcacgcttcttacgactaaccttgatgacacacgcgtcgtacttggtctgctttgagtagataccgatgataagctgaataaaaagttggctgatgacgggcaccgaaatacggttgacgttatgcatagaacggaaaaccttattaaaggtgaagtaaatactgtcctccacctgctttttgaggcggtcgcgctcgaccacctcttggatcacgtcggcgtaacggccggcgtgcgtcatgaggtagctgtacacgccgctgagcacggcgctgatgatgttgacgtcgtccagtgcgacctcctcgataggttccaacaggtggctacgcgccaccggatagagagtctcgtataccaggcccgtcttgacgcagacggagccctcgagcgtggagacgagcgcgcagccgctgcccagatcacacaggtgcgtgcgaaagcagcgcgtgcacgcgtagagggagtgtaactggatctcctcggtaaacgcgttctggacgtgcctcatgtcacaggcgcccgaggcgtcgcacatgacgtctgagcgtcgctgacagttttgggggcggagggaacaggagaagggcagggacgacaggtgttgcttgtctccacgacgttcacgtccgggtggctgcaggcgtccaggatgtcgttgacgcactccaccgtcaggtgctcgaacacggacgcgaccagttccaagcggcgcgggcctgactcctcggcctggaaaaggaaggaaaagtgttgaaagaggcggtcgacaaagataaaaacatcctccgtagtggcgtgcgcgacccccagtcggttgagttccgtcagcaacgagttcatggcggctgtggcgggtcgcgacgacgacactttcgtttttatgggcgcgcgtcacgcggcgccggtgtcggcggattggttccggttttcaggtcgcagcccggttggcacacggcgatcccgcctcacctggcggctcacctggctcacctgtccggccccaccccgactctgtaggcttccagccgagcgtgcgtaatcataagagtcccttttctgtctcctctctacacagagcatccgaggacaaaacttccatttgctgctggtggacgaggcgcacttcatcaagaaagaggccttcaacaccattctggggttcctggcccagaataccaccaagatcatcttcatatcgtccaccaacactaccagtgacgccacgtgtttcttgacgcgcctcaacaatgcgccctttgacatgctcaacgtggtctcttacgtgtgcgaagagcacctgcacagcttcacggagaagggcgacgccacagcgtgtccttgctaccgactgcacaagcccaccttcatcagcctcaactcgcaggtgcgcaagacggccaacatgtttatgccgggcgctttcatggacgagatcatcggcggtaccaataaaatctcgcagaacaccgtgctcatcacggaccagagccgcgaagagttcgatattttgcgttacagcacgctcaacaccaacgcctacgattatttcggcaagacgctttacgtgtatctggacccggccttcaccaccaaccgcaaggcctcgggcacgggcgtggcggccgtaggcgcctaccgacaccagtttctcatttacggcctagagcatttctttttgcgcgacctctccgagagttctgaggtagccatcgccgagtgcgcggcgcacatgatcatctcggtgctgagcctgcacccttacctggacgaactgcgtatcgccgtggagggcaacaccaaccaggcggcggccgtgcgcatcgcctgcctcatccgacagagcgtgcaaagcagcacgctcatccgcgtgctcttctaccacacgcccgaccagaaccacatcgaacagcccttctacctcatgggccgcgacaaggcgctggccgtggaacagttcatctcgcgtttcaactcgggctacatcaaagcctcgcaagagctcgtctcctacaccatcaagctgagccacgaccccatcgagtatcttctggagcagattcagaacctgcaccgcgtcacgctggccgaaggcacgacggcacgctactcggccaagcgccagaatcgtatctcggacgatcttatcatcgccgtcatcatggccacctacctgtgtgacgatatacacgccatccgtttcagggtcagctaggcacgcagcagagccaccaggtgccggcgactgacgccggcatcggcagaaacgagacgatcgtaacccaggcgcgtaaaactccccaaaggcgaaaacgtttcagcgtagtcggctaacaaagcccgggccgccgccagcgtccgcgcctgcacgccgccgtgactgcgataataacggcgcagcaccacgttgacaaggtcgttctcctcgacgcgcggcggcggaggatccaaggcctccagcgcctcctggtgcaaatgcagcgaattgagcaacaaacacagacaggcggccagcttcatcgtcttgcgatgtagcagaaaaccgccgcttgcgcccgagacggcggcatcctcgggctttccggccaacatgcccagcatctcctcgcccatctcgtcctcgtccagctcgtaaagacagacttgacaaagaaaatagttctccagacgcggcacgtcgagcaagagcagcttcttagcacccgccagccccacgcagtgctccagcagacgggcggatgaacgcggaatattactcattcgcaaacggtgataagcgctggccaccacaccatcaaacatgtccgaatcaccgcgcgtggcactctgtaacaacggcgctagacgctcctccatctcgggcggacaaagaaccagctcctcgtgcgagcgccgttccagcaaaaaaaaatattggcggaacgtgttcaccagggcgcgcgccgccgagattcgtcgctgcaccgtagtgatcacaacgtccggcgcccaaagcacgctggtacccggccaaataacgtgtctggggccggtgctgccgccgtcgttgacgcgaatcatataaatgcccggcatgtcgtacagctcgtccctgctgtcgtcgtctccccggcgctcctcaccactcgcatcaccgtcgcgccaccgtagcctactactccccaactgaccgcattccaccaccaacttggcgcaatgggtaatgcccgtaagcgcgtacaccagatcgctatgcttctgccaatagatggagaagacggacgacctgcggttaaaacgaccgctgcaataaaaacacagctcggaagcaaaaaccacgtcgtcttcggcgtcgggcggcggcggtaacacacggcgaatcagttgcgacagcggtccgttgcgaaacgcgtgctcgcgcaccgtaccgtcgtccattaacaacgccgcgtcgtgccaacccggcgtcggacgctcctccggacgaaacgccgcggcggcagcggccgcggcttccatcatcgtgatgcaaaccgcgctcgcggcgacgtgggttcagaactgccgtcaacgctgacggaggtttggacagaagggacggaggaagatgaggacacacacaatgggggaggggatggacacaggcccgatgtggctgcggccgccgagcacaatcgaaacaacgtctggtggatcacttcgcgcgtgtgcggcgtaccgctgatactctgcaacacgcccagcacctcgactaacactttgaggcgcgtgcgagggatcttgtgggcttccacgtgccgacacaccgtcagcacgttggcgttccggcccaggtgatccaatttgacttttttgttccgggccaggatcttgggcacgttgttggctagacgactgccgatgagcgcacaagtgtgcttgatcttggtgtgcgccgtgaggttcttgctgtagtcaaagagaccccgctgtgccgcctcaaatactaggcggtccaactgcagccgcttctctcgaccgtgcagcttgagcaggcaagcacgcagaaacagcactaactgcttggccaggaaggggatctggtacgaattgcgcagctctagttgcgtgaaaacgcggtgcagaccgtaatcgatgcacacgtcgcgcatgttcttgatgcacgagagttctttgagcagaatggcttccaggtcagcgcccgagacgcgcggcacaatggccgtagccgctttgaaccagcccacgttgacgttgttagtatgcgagatcatgcacggaaagttggtggtccagtacaccttgctgcgctccgagcggatcaccgcctggtcctccagcccatgcacgtccagcgaggagttgctgttgcacaccacggccggcagaaaaaagtgatcgatattaacgtgcagccggtacacgcccagcgagtacagaaactcggggtaggaaccgcgaatattgacgttgagcgagttaatgtagacggcgtcgttggaaacaaaggtgctgacggtgcaagcgggctccttaaaggtgtgcttgtacatcacaaaactgtgggtcatgttcttgggaagccgcggcgcgcgcacgccgagacccgacgcggcgatggacgagagcgcggccttcatattgataacgcggttggtgttgaaagcgttgacggcgatgcggtccagactcacgcccgtcacctcggcaaactccatcccgccgatgagcttacgacggcacggcgcgtaacgctgcacggctagatgtttacgacgtcggtgttcctgataggcccggcgcagctgctgccccgtaaagtcaaatggcggcgtggcgtcagtctcccccgattccagcgtctcttcctcctcctcttctcccgtctccgaccgccgttgacggtgtttacgccatctctccccgtaccgagcgtacatgagacgcgagatgatgcacacgtaacgtcgaacgcgatcggcggccgggtcgcgcggcagtgacagcttgtgacccgcgctcgtcgtcgggagcgcggtggaagacagcgcgtgtccgttcgccgaaaccaccgtcgattctgacggtgatagccgcgacgtcctcggagcgcaagaaacaccgtaaccgcggtttacgggtcggttccccgtcccatgggaccccagatcccgagctagttcataataaacgtagaaaaggtttctccacaccgtgtccgtgtcggcaaacgtgacgctaaggcgtcgataacacagtaggttgtggtgtccctgatttccaccgtttccccctcccccacttctgtcagcgtggccagtccggcacttgccgtagctcacctgtaacttgaagtacagtacctgtcgcttgaagcgactgagaacgaaggtgctcaggtggcacaccgtctgctcgggcaagcgaagcgccatcatgacgcgggcgcggtcgcgatgcagctgagccagcacgcgaccgaaaaactccgacgtcacttcgtggtgatattcaacgcccagccaaagcttttgcagctccagtagaaaaaagtcgcgtgtagcgtccaacgcgcacggcgcttgcggacgcacgttgagtccaaagagcagcttgtagtgaacctggatgcgcggcgccgcggcctcgcccaggtagccggagacggcggttacgtagtcgtctacctcgctgacactgagtacgcgtccgatttccaccatcaggtaaggatagtcgtccaggtgcaggctgaggtcgcgcggcaggcaggccatagcgtagcgttcctcggttcccgaggcgccaccgccgccaggacagtcgcaaaagaggctcggcaattctcgattccattccgtcagcgagagcaatccgcgtagcacatgcgtggccacgtggttttcgagaacgtggtaggacagcgcgcgcccggcggtcacggatccgcaacaacaacgtcggtgcacgtagagcagcggcccgcgacaaaactgcgtcgtaggtaccagatgttcaccgtggccctccacttcaccgtcgcaaaaacagggtacggccacgggtcccagtaacagacgacccagtaccagcttgacacgctcgggctcggtcctcacgtgtatcggacaggcacggtagagagccgcaaaaacagcgcgcacccgttcgacgttaacgggtcgcggacgacagaagcgggcgtcctcgcccgtcgatagctcttgggtgaggttgcaggcgcgaacgtgcacggggacgtgtaaaacccggcgcggcatagcggagccgccgacgactattagagcgtcacagccgaggcggcgcggcgcagcgccggccattctccgggtcgcgctgctttccccgagctccgacgcctcgcgctcacgccgccgccgcgatggagaactggtcggcgctcgagctcctgcctaaagtaggcattcccactgactttctgacgcacgtcaagaccagcgccggcgaggagatgtttgaggccttacgcatctactacggcgatgaccccgagcgttacaatattcacttcgaagccatcttcggcaccttctgcaatcgcctggaatgggtttattttttgaccagcggcttggccgcggcggcgcacgccatcaagttccacgacctcaataaactgactacgggaaaaatgctgttccacgtgcaggtgccgcgtgtggccagcggcgccggtttgcctaccagtcgtcagaccaccattatggtcaccaaatacagtgaaaaatcccccatcaccatcccctttgagctcagcgcagcctgcctcacgtatctgcgcgagacgttcgaaggcaccatcctggacaagatcctcaacgtggaagctatgcacacggtgctgcgcgcgctcaaaaacacggccgacgccatggaacgcggcttgattcacagctttttacagacactgctacgcaaggcgccgccgtactttgtggtgcagacgctggtagagaacgccacgctggcgcgacaggcgctgaaccgcatccagcgaagcaacatcttgcagagcttcaaggccaaaatgctggccacgctctttttgctgaatcgcacgcgcgatcgcgactatgtgctcaagttcctcacgcgtctggccgaagcggccaccgatagcatcctagacaaccccaccacgtacaccacgagctcgggggccaagatcagcggcgtgatggtaagcacggccaacgttatgcagatcatcatgtcgctgctctcaagccacatcaccaaagaaacggtctcggcgccggccacctacggcaattttgtactcagtcccgaaaatgccgtcactgccatatcctatcactcgatcctggccgatttcaactcgtacaaggctcatctgacttcgggccaaccgcatttgcccaacaactcgctttcgcaggccggggcgcacagcttaacgccgctgagcatggacgtgatccgactgggcgaaaaaacggtgattatggaaaacttgcggcgcgtctacaaaaacaccgataccaaagatccgctagaacgtaacgtggacctgacgtttttcttccccgtagggctgtatctgcccgaggatcgcggttacaccacggtggaaagcaaagttaagcttaacgacaccgttcgcaacgcgttgcccaccacggcctacctgctaaaccgggaccgtgccgtacaaaaaatagactttgtggacgcgctcaagacgctgtgccacccggtgctgcacgagcccgcgccctgtctacagaccttcacggaacgcggaccgccctcggaacccgccatgcaacgactgctcgagtgtcgttttcagcaggaacccatgggcggtgcggcgcgccgcataccgcatttttaccgcgtacgacgcgaggtcccgcgcacggtgaacgaaataaagcaggactttgtggtcaccgacttctacaaggtgggcaacatcacgctctacaccgagctgcaccccttcttcgactttacgcactgccaggaaaacagcgaaacggtggcgctgtgtacaccgcgtatcgtcatcggtaatttgccagatggactggcaccgggccccttccacgaactgcgcacctgggagatcatggaacacatgcgactgcggccaccacccgactacgaagagacgttgcgacttttcaaaaccaccgtgacaagccccaattaccccgagctttgctacctggtcgacgtgctggtacacggcaacgtcgacgcttttttgctaatccgcactttcgtagcacgttgtatcgtcaacatgtttcacacacgtcagctgctggtttttgcgcacagctacgcgctggtgacgttgatcgccgaacacctggctgatggcgccctaccaccgcagttgctctttcactaccgcaatctggtcgccgtgctgcgtctggtaacgcgcatctcagcgctgccgggacttaacaacggtcaactggctgaggaaccgctatcggcttacgtgaacgcgctgcacgaccaccggctgtggccccccttcgttacgcacctgccgcgtaacatggaaggcgtacaggtagtggccgaccggcaaccgttgaacccggccaacatcgaggcgcgacaccacggcgtttcggacgtaccgcgtttgggcgccatggatgccgacgagccgctgtttgtggacgattaccgtgccaccgacgacgaatggacgttacaaaaggtcttttatctctgcctcatgcccgccatgaccaacaaccgggcctgcggcctgggactcaacctcaagacgctgctagtagacctcttttaccgaccggcgtttctcctgatgccggccgccaccgcggtctccacgtcaggtacgacgtcgaaagagagcacaagcggtgtcacccccgaagactcgatagcggcgcaacgtcaagccgtaggcgagatgctgaccgagctggtggaggacgtcgccaccgacgcacatacgccgctgctgcaggcctgtcgtgaactgtttttggccgtgcaattcgtgggcgagcacgtcaaggtgctcgaagtgcgcgcgcctctggaccacgcgcagcgtcagggcctgccggactttatctcacgtcagcacgtgctttacaacggctgctgcgtcgtgacggcgcctaagacgttgatcgagtacagcctacccgtacctttccaccgtttctactcaaaccccaccatctgcgcggcgttgagcgacgacattaaacgctacgtgaccgagttcccgcactatcaccgtcacgacggtggtttcccgctacccacagccttcgcgcacgagtaccacaactggctgcgctcgcccttttcgcgttactcggccacctgtcccaacgtgttgcactcagtcatgacgctggccgccatgttatacaaaatctcaccagtttcactggtgctgcagaccaaggcgcacatccacccgggattcgcactcacggccgtacgcaccgacaccttcgaggtggacatgctgctctacagcggcaaatcatgcacgtcagttatcatcaacaaccctatcgtgaccaaggaggaacgcgacatcagcaccacgtaccacgtcacgcagaacattaacaccgtagacatgggtctgggttacacgtcaaatacctgcgtagcctacgtaaaccgcgtgcgaaccgacatgggcgtccgcgtgcaggacctctttcgcgtcttccctatgaacgtgtaccggcacgacgaggtggaccgctggatccggcacgcggccggcgtagaacggccgcaactgttagacacggagaccatctccatgctgacgttcggcagcatgtccgagcgcaatgccgccgccacggtgcacggacaaaaggccgcgtgcgaactaatccttacgccggtgacgattgacgttaattactttaagatccccaacaacccgcgcgggcgtgcctcctgcatgctggccgtcgatccgtacgacacggaggccgccaccaaggccatctacgaccatcgcgaagcggacgcacagactttcgcggccacacacaacccctgggcctcgcaagccggctgtctgagcgacgtactctacaacacccgacatcgcgaacgtctaggctacaactccaaattctacagcccttgcgcgcagtactttaacacagaagagattatcgcggccaacaaaacgctcttcaaaaccatcgacgagtacctgctacgcgccaaggactgcatccgcggcgacacggacacgcagtacgtctgcgtcgaaggcacggaacaactcatcgaaaacccgtgccgtctgacgcaggaagcgctaccgatcctcagcaccaccacgctggcgctgatggagaccaaactcaagggtggcgccggggcttttgctacgtccgaaacgcactttggtaactacgtcgtaggcgaaatcatcccgctgcagcaatccatgttatttaactcgtgaggccgtccggtgaggaggacggcgacgaccgcaggttagcggcgagtcacctagacgcaaacgcgggcccggacgcgccacgctcgctctgacgccgcgcccggtgcagacgttgttcgtctctgcttctcctccgtcgcggccaggatttcaccgccgctatggcggccatggaggccaacatcttctgcactttcgaccacaagctcagcatcgccgacgtaggcaaactgaccaagctagtagcggccgttgtgcccattccgcagcgtctacatctcatcaagcactaccagctgggcctacaccagttcgtagatcacacccgcggctacgtacgactgcgcggcctgctgcgcaatatgacgctgacgttgatgcggcgcgtagaaggcaaccagatcctcctacacgtaccgacgcacggactgctctacaccgtcctcaacacgggacccgtgacttgggagaagggcgacgcgctatgcgtgctgccgccgctcttccacggaccgctggcgcgcgagaacctgctgacgctgggccagtgggagctggtgctgccctggatcgtacccatgccactggcgctggaaatcaaccagcgactactcatcatgggcctcttctcgctcgaccgttcgtacgaggaggtaaaggctgccgtgcagcagctgcagaccattacttttcgcgacgccaccttcaccatccccgatccggtcatcgaccagcacctgctgatcgacatgaagaccgcctgcctctccatgtccatggtggccaacctagcctcggagctgaccatgacctatgtgcgcaagttggcgctagaggacagctccatgctgctcgtcaagtgccaggagctgctgatgcggctggaccgcgagcgcagcgtcggcgagccgcgcacgcccgcgcggccgcagcacgtgtcacccgacgacgagatcgcgcggctgtcggcgcttttcgtcatgctgcgacagctggatgacctcatccgcgaacaggtcgtcttcacggtgtgtgacgtttcacccgataacaaatccgcgacctgcatatttaaaggctgagccggccctctcgcgcccgcagacaccaagcatgccacgcgtcgaccccaaccttcggaatcgggcccgccggccacgagccagacgaggcggcggcggtggcgttggcagcaatagcagccgacacagcggcaaatgccgccgccaacgccgagctctgtcgacgccgccgctcactttcctcgccactactaccaccacgaccatgatgggcgtcgccagtaccgacgacgacagtctcctcctgaaaacgccggacgagctggacaagcacagcggctcaccgcagaccatcctcacactgacggataaacacgacatccgtcagcctcgggtgcaccgcggcacctaccatctgatccagttgcacctcgacctccgacccgaagaattgcgggatcccttccagattctgctctctacgccgctgcaattgggggaagcgaacggcgagtctcaaaccgcccccgcgacgtcgcaagaagaagaaacggcggcttctcacgagcccgagaaaaaaaaggaaaaagaagagaagaaagaagaagaggacgaggatgaccgcaacgacgatcgtgaacgcggcattctatgcgtggtctctaacgaggattctgacgtgcgcccggccttctctctctttcccgcacgcccaggctgccatatcctgcgctcggtaattgaccaacaactgaagcgcatggccatcgtgcgcttatcactcaatctgttcgcgctccgtatcatcacgccgctgctgaaacggctaccgctacgacgtaaagccgcgcatcacacggcgttacacgactgtctggcgctgcatctgccagaactcacgttcgagccgacgctggatataaacaacgtaacggagaacgcggcttccgccgccgatgccgcggaatcaacggacgcggatctaacgcccacgctgacggtgcgcgtacgacacgcgctgtgctggcatcgagtggaaggcggcatctcggggccgcgtggactcaccagccgtatctcggcgcgcctctcggaaaccactgccaagacattgggaccctccgtctttggacgattggagctagacccgaacgaatcaccgccggacctgacgctgtcgtcactcacgctataccaagacggcatgttacgtttcaacgtgacctgcgaccgcaccgaggcgccagccgacccagtggcgtttcgcctgcggctgcgacgcgaaacggtgcgacgacccttcttttcggacgcgccactgccttactttgtaccgccacgctccggcgcggcggacgagggactggaggtgcgcgtcccttacgaattgacgctgaagaactcgcacacgttacgtatctaccgccgcttttacgggccttatctgggtgtttttgtaccacacaaccgtcagggactcaaaatgcccgttacggtctggctaccgcgctcctggttggaattaaccgtactggtgagcgacgagaacggcgccacgttcccacgggacgcgctcctggggcgcctctattttatctcgtcaaagcatacgctgaatcgcggttgcctgtcagcaatgacgcaccaagtcaaatccacgctacactcgcggtctacgtcccattcgccgtcgcaacagcagctctcggtgctgggcgcttccatcgcgctggaggacctgctgcccatgcgtctggcgtccccggagacggaaccgcaagactgtaagcttacggaaaatacgacagggaatacgagtcctgtcactttagccatggtctgcggcgatctctaaacagaggaccctggtgatgggaaacggacactaggcgtccgcgcgatacggggttaaaacaaaaaaaaatcggtggtggtgtgtgatggggtgtggtgacggtggggcttcgcctctttttttttaataaaaaaagacactcaataatccgcggttgtctctgtgtagaacgtttttatttcgggttccgcgtctggtcgcctgcctatgtaaggcggcggccggagagggcgcgccgctcagtcgcctacacccgtacgcgcaggcagcatggagtcacgcggtcgccgttgtcccgaaatgatatccgtactgggtcccatttcggggcacgtgctgaaagccgtgtttagtcgcggcgacacgccggtgctgccgcacgagacgcgactcctgcagacgggtatccacgtgcgcgtgagccagccctcgctgatcctggtgtcgcagtacacgcccgactcgacgccatgccaccgcggcgacaatcagctgcaggtgcagcacacgtactttacgggcagcgaggtggagaacgtgtcggtcaacgtgcacaaccccacgggccggagcatctgccccagccaggagcccatgtcgatctatgtgtacgcgctgccgctcaagatgctgaacatccccagcatcaacgtgcaccactacccgtcggcggccgagcgcaaacaccgacacctgcccgtagccgacgctgttattcacgcgtcgggcaagcagatgtggcaggcgcgtctcacggtctcgggactggcctggacgcgtcagcagaaccagtggaaagagcccgacgtctactacacgtcggcgttcgtgtttcccaccaaggacgtggcactgcggcacgtggtgtgcgcgcacgagctggtttgctccatggagaacacgcgcgcaaccaagatgcaggtgataggtgaccagtacgtcaaggtatacctggagtccttctgcgaggacgtgccctccggcaagctctttatgcacgtcacgttgggctctgacgtggaagaggacctgacgatgacccgcaacccgcaacccttcatgcgcccccacgagcgcaacggctttacggtgttgtgtcccaaaaatatgataatcaaaccgggcaagatctcgcacatcatgctggatgtggcttttacctcacacgagcattttgggctgctgtgtcccaagagcatcccgggcctgagcatctcaggtaacctattgatgaacgggcagcagatcttcctggaggtgcaagcgatacgcgagaccgtggaactgcgtcagtacgatcccgtggctgcgctcttctttttcgatatcgacttgctgctgcagcgcgggcctcagtacagcgagcaccccaccttcaccagccagtatcgcatccagggcaagcttgagtaccgacacacctgggaccggcacgacgagggtgccgcccagggcgacgacgacgtctggaccagcggatcggactccgacgaggaactcgtaaccaccgagcgcaagacgccccgcgttaccggcggcggcgccatggcgggcgcctccacttccgcgggccgcaaacgcaaatcagcatcctcggcgacggcgtgcacggcgggcgttatgacacgcggccgccttaaggccgagtccaccgtcgcgcccgaagaggacaccgacgaggattccgacaacgaaatccacaatccggccgtgttcacctggccgccctggcaggccggcatcctggcccgcaacctggtgcccatggtggctacggttcagggtcagaatctgaagtaccaggagttcttctgggacgccaacgacatctaccgcatcttcgccgaattggaaggcgtatggcagcccgctgcgcaacccaaacgtcgccgccaccggcaagacgccttgcccgggccatgcatcgcctcgacgcccaaaaagcaccgaggttgagccatccgccgcgcacgcgcttaggacgactctataaaaacccacgtccactcagacacgcaacttttggccgccacacctgtcgccgctgctatatttgcgacagttgccggaacccttcccgacctcccacgaagacccgttcacctttgcgcatcccctgacccccccccatcccgccttcgcaatgtctcaggcatcgtcctcgcccggtgagggaccctcgtcggaagcggccgcgatcagcgaggccgaagccgccagcggaagctttggtcgcctgcactgccaggtgcttcggctcatcaccaacgtggaaggcggctcgctggaagccggtcgtctgcgactcctggacctgcgtaccaacatagaggtgagccggccctcggttctctgctgttttcaggagaacaaatctccgcacgacaccgtagacctgaccgacctaaacatcaagggccgctgcgtggtgggcgaacaggaccgactgctggtggacctcaacaactttggcccacgacgcctgacgccaggctcagaaaacaacacggtctcggtactggcctttgcactgccgctggaccgcgtgcccgttagcggactgcacctctttcagagccagcggcgcggcggcgaagaaaatcggccgcgagtggaggcgcgcgccatcatccgccgcacggcccactactgggccgtgcgactgaccgtaacgccgaactggcgccgcagaaccgacagcagcttggaggccggccagatctttgtcagccagttcgcctttcgcgccggcgctatcccgctgacgctggtagacgccctggagcagctggcctgttcggaccctaacacgtacatccacaaaacggagacggacgagcgaggccaatggatcatgctgtttctgcatcacgactcaccgcacccgccgaccagcgtgtttctgcacttttcggtttacacgcatcgcgccgaggtggtggcgcgacacaatccgtacccgcacctacgacgcttgccggacaacggcttccagctgttgattcccaaaagttttacgctgacgcgcatacatcccgagtacatcgtgcagatccagaatgctttcgagaccaatcagactcacgacaccatctttttcccggaaaacatcccgggcgtctccatagaagccggcccgctacccgatcgtgtgcgaatcaccctccgcgtcacgctgaccggcgatcaggccgttcatttggaacaccgacagccgctaggccgcatccactttttccgccgtgggttttggactctcacacccggtaaaccggacaagatcaagcgtccccaggtgcagctgcgcgccggtctctttccacggagcaacgtcatgcgcggcgccgtctccgagtttctcccgcagtcccccggattaccacccaccgaggaagaggaggaagaagaggaagaggacgacgaagatgacctctcctccacaccgacgccaacccccctgtccgaagccatgtttgccggcttcgaggaggccagcggcgacgaggactcagacacccaagccggactgtcccgggcactgattctgaccggacaaagacgccgaagcggtaacaacggggctctcacactcgtcatcccctcgtggcacgtctttgcgagcttggacgacctggtaccattaacggtgagcgttcagcatggcgcactacgacctacctcttatctgcgcagcgacatggacggcgacgtgcgtaccgcggcagacatcagcagcacgttgcggtccgtgcccgcgccacgaccctcgcccatcagcaccgcttccacttccagcaccccacgcagtcgaccccgcatctagagagagacttctttgttgttcccccgcgtgtttttcccattccctgtatttatttttaaataataaaaacagagacgttgataataaccgcggtgtgctttattagggtatcatgatgtagaaaaaaaagagagggaagccctaaatatagcgtctctcttactcgagcttattgagcgcagccacaaaaatccgccgattcagatccaccatgtctttgggcgggctctgggaagctgcggcggcttgggcagcagcggcggctaacacgacactagccgggcaggaagaagaacccgccgtcgaaggccctgccgttgccgcctcagaacccgacgcggtagcgaggcggcaactggcgttcaccacgccggcctgagcgcgctcagctaccttggcacctcctgatagaagtgccgtcggtgtttctcctccgccgctcgtcagctcgccggtgggagtacacacggtagtagtagtcggggaggaagaggccgcagcagggagagccgccgaaagtaacgtagaactctgccgcgcggcaaacagatcgcgtttcagctcgtgaatggcatcccgcagttcatcgtaacgttgttgctgctgctgattggaacccgcgtgcccgccacttccaccgtcgctgttgacgtgactttttagacgctttcgcgcccggccgtgctcggcctcgccggggaaactcaagtcttcgtccgaggacgacgacgacgccgccgcggcttccttacggcgtttgttgtgtccgccgctgcccccgtgacggtgctgcttctgcgactgaccacggtgaccaccgtcgtaacgctcccatccggacggtggttcatccataccgcccggagagtcgcgccgacggtaataggccggtgatggtggcggcggcacgggataagacggatgcaaaggcggcgcgggctcgtaacgccgaccccacccgggataatggggatccacgtagtccgcaaagtgacgtgccgccaactggtcgtaacccacgacgggggcgccgtaggacgcgggataagacggcaaaggcagcggtgctggcgaagcagaaggaggggccgctacggcgccgggatacatgacgggcgctgccgagcgactggccccaagtagcgagaaaaaagcgtctttgggtaaataaactccgtcgtgaggccacgctaaagacggcacagccggcgacgcacctgccacggtagcacctggaggagccgtagcggcggtaaccgcagcactcagagggtgcgacatggacgccgcctctgccggctccaaaggagaaagcgacggcggtgattccgtggggagaacggacggcgacgctggaagcgcaggcggctggacaggagatggcggttcgactggaggcgacggggatgaagagggaacgcgcgccccagccgccggcgtggcggcctgactgcggctgtcgcccgaacgctcggcggacgccgctttaatatcgcacgccgcctcaggcgaaacgctcgccttgacgtacgactcgcgctccgtcacgccgactagttgcttgtcgtagcgcagcttgggcagtcgctcacggatgtagagcgcgtccacgctgttgcccaacaggccgtagctgtctgagcgaaagggatcgcccgacgcgtcgacagcagtgctgccgcagcgctgccactgtgcacgtagcccgtcgcggtcggccgccgtgaggtctggaaaccgctgggtaacccactcgggatcgcgcccgtacacggccaacgtaccgcgacgccgacccacgctgcacaaagccacgtgtttgaacggcgtggtttccgagcccgaaagcgacgtcgcggcctccacgtcgtcgcagcgccggctggagagcgagaggccggcgtagctgccgctgagaaactccaccaccttgtccggctgcagcggactgacgggcccacgcgaaacaagctcggacttttccgaagcgcggcgcacaatctccagaaacctgggcgaagtgacgcagcctaggcaaaaaagaccgtcgcgaacgctctgcatcgccgcaacgtgtcctacaacggccgtgtcgtcgtgattgatgttgagcgggagcgcgaccgacaacgaaggctgtccctggccctgcgcgtgcaaccagtgctccactacgtcccgcggcaacagcaattcggcctcgtccggagactggtcgtaacgggcgagaaagccgcccacgtagaccggcgctacagcctgcggctgctgttcgtccatcgtcattgtcgtcaccgtcgctacccgctcaccgagcgaacgatgatggcccgcgacgaagagaaccccgccgtcccgcgggtccgcacgggcaaattctcctttacttgcgccaatcatctaatattacagattagcgagaagatgtcgcgcggacagccgctgaactcgctgcgtttggaagaactcaaaatcgtacgcctcatctgcgtcctcctctttcaccgcggtctcgaaacgctgctactgcgcgaaaccatgaacaacctgggtgtctcggaccacgccgtgcttagccgcaagacgccgcaaccctactggcctcatctgtaccgcgaactgcgccaggccttcccgggactggactttgaggcggctgtgttcgatgaaacgcgcgccgcccgtctcagccagcgcctgtgtcacccgcgcttgagcggcggactgctgacgcgctttgtgcagcgccacaccggcctgccggtcgttttccccgaagacctggcgcgcaacggcaacatcctcttctccctaggcacgctctacggacaccgcttgtttcgtctggcggccttcttcacgcgccactggggtgccgaagcgtacgaacccttgattcgcatcatctgtcaaaaaatgtggtacttttatctcatcggcaccggcaagatgcgcattacccccgacgccttcgagatccagcggagtcgacacgagacgggcatttttacctttattatggaagattacagaacgttcgccggcacgctgtcccggcacccgcaccgtccacacccacaacagcagcagcaccaccaccccggtcccccccatcctcctctttctcaccctgcctcgtcctgtctcagcccagaggccgtactggccgcccgcgcccttcatatgccgacgctggctagcgacgtgtgaacctaacgtgatttatctgccacttttctccccgctgccgtacagcgccgccgctcataatgccgtcaccgtcgcgtccgacgcgacggtgttttcgccgtcggtgcagaggacggaggaactttcggccgaaacatcgatcgtagtcccaggacacatttcggaagccataccttccgcgtgctccaccaacgtggctttctccgacgtggttgtcgttaccacaacggccgccgatgtcgcgtcggcgtaacaacggctggaggactttttcaccgcttcggcgacgtctcggacggacgtagaaaagtaacacacggccagctccacgctatacatagcccgcttcaacgcctgcaccaaccgacgtacgaaatgaccgtggcagctttgctgacatctctcgaccagataatcaaaggagtcatccagatccttggtgggctcgcgggaaaagaacgcaatgataaagagcggcagaatgccaagacgcatggtgagaagggtacgcgtagccaattccacgtaatccataatgccgaaacctgtgccggccgcgctagcgggctgcagtacaccgcgtaggactctgaagcagtagtagggcacaaaaagcatgagacacgtcacgtagaaggtgcagacacgacccacgtaggaccagacgtggtcgcgccgatcgctgtaggccaactctaccacgttagccagtacggcgatcatgggcgcccccagcaaaaaccacatcttgatggtgaggtccaccgcggcatactgtatagggatctgacagcctagccaacggtagtccagtgaacccgtagcggcggtgggcacagcggctacgatggaaagaacccaggcaaaggcgaccgcgtagagcgccacgccggcgttttcgcgcgtctcatgatgccagagatcacggccataagagatggccgacagacgatccagtatcagaaagaggaaaaacaacgccgtcgaatataggcccacgtcgtcgacaaagagcactaagcgacagaggctgagatttagagcgccacgcagcatgatacccttggacaacatggtagccacgatggaaaaaaactgactaagtaccaggttccaagtaaaaatcatcacggacacgggcggccgcgtaacacgcaacacccagaggcaaccgatgatggtcagcaggttgactaggctaacggagccgaacatgccgatgagcaggtccgaagcggcgcgatcggccgacatagagtagccttcgaacgggcccatgtatttgaaattcacgatagcgagcatgatggaatcggtgactgaggtagtcttctccgcagaaggggacatacccaccaccgccgcccgctctctccgaacgaatataccctctccggggacgctcgccctttatgcagcaagcgacacgtggtggaaattacaacaccgccacgctcggaagaaaacccaacactaaaaagtacaacagttcgtaaatatcgttgacgttaaagagggacgagcccagagtggacacacgatgacgcggcagggtcactgacaacagccgccctagcccgtgttcgtagtgaaagagcagggcgtcgtgtacttccaagcgacgtaaatcgccgtactgtttggagctctgcgcgaacatgtagtcggccacgggattgctcttgctgagctgcatgagcacggcgccgccgccgtcgccacctccggcgctgtcctcgcgacgtgagggatcccagccgctgcgcacgctctcggtcacggccaacagagccaggccgggaaagagctgcgacagcgtgaccgcggggtcgcgcgcgtaccacggcccgatgtagtactgcaccagaaactcaaagttacgtacccgcccgtgccgtcccccatagccctcctcttcgccgcccgcgcgccccccgggcaatccaccgccggccacagcgtccgaacccagcaggtcggccaacgtgaatttgcccgtacgcggagcgaagacgctatccgcgttggtcaccttccacaacagcaacaggccagccaggcaggtcaagcccgaacgcagatattgctgttcgtgcacaaagacgggcacgtcacgacccagcttgccgaccagcagacgtcggctccagagagaaagcacatcgtctcgcacctggcccgacagacgctcctgcaccagctcctctgttatcgtcccgtagcccggcaaatgctggaggacgccgcgtttgtggaaaagccgcaccagcacgtgacgatcaaaagtgcccgggtgatagtggcgaccaccacttaggggcatgtagtaacgtagatcgggcgagtcgcgatacgcgtaatagttgttacccgcggcgacagggccttcccaagcggcaatctcacgacttacgtcatcggccagacgcggcaacagctgagggagctcacccaacaccgtcgccacggagtccggcggatcgcggccctcccaaagcgcgtgtccgtaggcggccagcagacaagcggcggcttccaaatcggatagtacgcagtcgtacgtcggatacaccgtcacgttttccaaagcgttgaccacgccgagcagcagctcctgcgaaatggaaaagttgtccatctgcgccagatggtacactcgtttccaccgtggttgcgtgtacaacccccgcttgagccgatagtaccagataccaaaggagaaagtccaagtggaggcgttctcgaacatggtgttgaccacctcgccgcgaaaatcggtgtgaaagcggataaagggatcgttctgcgtgattccaaagtagctaggtacgttcccgggcaacggccgctcggcgcactgcgccagccaggtagaagaagcaccagcggccgctgacgcggcgaccgcgtcagacgaggcggcggcgggtcccgtgatggcatcgtgccgactataaagaccgtgtgggacggcgaaagctcctgccacgccggtccctggggacgacgaacgcggacgacacggtggttgtagcagcgtccgcggcgacggtccttcgtcgagctcgcactgctggttcaacagcgcctccgcctcggacacgcgcccttcgagatcctcgcagtaagtctgcaccctgtgacccagatccctcatctcctgacgcagataccgtttgcgcacccggtccatgagcacgtcctcgcgccagcccccgccgcgcattgccaccgccgcgtcctccagcaaccgccgaagcacgcgctcggggcagcgcagcacgttttcctcgtgcggctcgaagaagacggcgacgggtagccgccaaaaggtgtgcaacagactcatcctgacgcctccctagatagtccaggacagaatcggtacacaggttaaaacggcctgagcggaaagcccgataaaaggatgggcgatcggccttttgctgaaaaaaaaccagactaggcaccacgctccagacttgaccgccaccgcgtggcagacgcagaaaatcaaagtccaccagtgcgcccttgagctggcgcaggccctcggcgtactgcaggctgtgggtggcgtgccaccgcacggactgatcgtcggcgtctgagtacgtggttttgaactcaatcacgtagcaatacacgatgccgcgcgacccagagtccggcggtaaaaacaccaacacgcaatcgggaatccgccgacttaatcgtacttcgatgaaaagacggcgacggtacttttgcaactcgggtgggaaaaggcctcccaacaggcggttgagcgccacaaacgagggaaagacccgcagcaggcgacggtagatgtccaggtgcttgcgcttaccgatccgcttacgcacgtgaggcaatctccgcagagcgttccccgtcaaatcagcgtcgtccccacgcccggacggcatggcttattcgcgtgtcccctcttctcccttcgcagcggccaatgacatcgtattaaatagacggagacgcgacttttgtaacccgtagcgccgcacccgggtgctccttcctgggatccttttttttccttctctcgggtgtaacgccaaccaccacctggatcacgccgctgaacccagcggcgcggccgcgctatgcggccaggcctcccctcctacctcatcgtcctcgccgtctgtctcctcagccacctactttcgtcacgatatggcgcagaagccgtatccgaaccgctggacaaagcgtttcacctactgctcaacacctacgggagacccatccgcttcctgcgtgaaaacaccacccagtgtacctacaacagcagcctccgtaacagcacggtcgtcagggaaaacgccatcagttttaactttttccaaagctataatcaatactatgtattccatatgcctcgatgtctttttgcgggtcctctggcggagcagtttctgaaccaagtagatctgaccgaaaccctggaaagataccaacagagacttaacacttacgcgctggtatccaaagacctggccagctaccgatcttttccgcagcagctaaaggcacaagacagcctaggtgaacagcccaccactgtgccaccgcccattgacctgtcaatacctcacgtttggatgccaccgcaaaccactccacacggctggacagaatcacataccacctcaggactacaccgaccacactttaaccagacctgtatcctctttgatggacacgatctactattcagcaccgtcacaccttgtttgcaccaaggcttttacctcatcgacgaactacgttacgttaaaataacactgaccgaggatttctttgtagttacggtgtccatagacgacgacacacccatgctgcttatcttcggccatcttccacgcgtactcttcaaagcgccctatcaacgcgacaactttatactacgacaaactgaaaaacacgagctcctggtgctagttaagaaagatcaacttaaccgtcactcttatctcaaagacccggactttcttgacgccgcacttgacttcaactacctagatctcagcgcactactacgtaacagctttcaccgttacgccgtggatgtactcaagagcggtcgatgtcagatgctggaccgccgcacagtagaaatggccttcgcctacgcattagcactgttcgcagcagcccgacaagaagaggccggcgcccaagtctccgtcccacgggccctagaccgccaggccgcactcttacaaatacaagaatttatgatcacctgcctctcacaaacaccaccacgcaccacgttgctgctgtatcccacggccgtggacctggccaaacgagccctttggacaccgaatcagatcaccgacatcaccagcctcgtacgcctggtctacatactctctaaacagaatcagcaacatctcatcccccagtgggcactacgacagatcgccgactttgccctaaaactacacaaaacgcacctggcctcttttctttcagccttcgcgcgccaagaactctacctcatgggcagcctcgtccactccatgctggtacatacgacggagagacgcgaaatcttcatcgtagaaacgggcctctgttcattggccgagctatcgcactttacgcagttgctagctcatccgcaccacgaatacctcagcgacctgtacacaccctgttccagtagcgggcgacgcgatcactcgctcgaacgcctcacgcgtctcttccccgatgccaccgtccccgctaccgttcccgccgccctctccatcctatctaccatgcaaccaagcacgctggaaaccttccccgacctgttttgtctaccgctcggcgaatccttctccgcgctgaccgtctccgaacacgtcagttatgtcgtaacaaaccagtacctgatcaaaggtatctcttaccctgtctccaccaccgtcgtaggccagagcctcatcatcacccagacggacagtcaaactaaatgcgaactgacgcgcaacatgcataccacacacagcatcacagcggcgctcaacatttccctagaaaactgcgccttttgccaaagcgccctgctagaatacgacgacacgcaaggcgtcatcaatatcatgtacatgcacgactcggacgacgtccttttcgccctggatccctacaacgaagtggtggtctcatctccgcgaactcactacctcatgcttttgaaaaacggtacggtcctagaagtaactgatgtcgtcgtggacgccaccgacagtcgtctcctcatgatgtccgtctacgcgctatcggccatcatcggcatctatctgctctaccgcatgctcaagacatgctgaccataggacctgacagtttacgagaaaagggacagagaggtcaaagacattcacacaaaaccctctaaaacggtacgggccccaatacctaggggcactcttgctcattgtaataaagtacacgccacacggtgtgatggtactatatgcgtgaagtctgtgcgtctttatttacgatgtattgttgtgggtctggttacatatcgggccctggatacaagctcggtacacagccaaggtgcgggagactaggtcgtcttggaagccgatgcaacagcggtagatgagcagcaaaacgaccagaatcagcagtgagtacacgcaggcaagccaaaccacaaggcagacggacggtgtagagtctcctcctctgtcatgtggggaaaaggagagatgagaggtgttaacttattgtttcttatatggctaactttcctgttgttctttttcataaactgtaagggtgcgcgatcacaacgagcaccatttcgtcctaggatatggcaccccacggtattaaaaaaactaaagcaattaaaattagaaattttaagacaactagaacctattccttacataaagtacccacaaatcaatacgactcgagttcaaagtcttactgttaatatgaccgagtttccttattattatattttagcaggtcctattcgcaacgaaagtgtaactcatttgtggtatgatttctatagcacacagcttaggaaaccagccaaatatgtatactctatgtataatcacacggcccgaaaaataacgttcaaacccccgtcgtgtggcgcagtgccttccatgacttgtctttctgaaatgctaaacgtttccaagcgtaatgataccggcgaagaaggctgcggtaactttaccacgttcaatcctatgtttttcaatgtaccgcgttggaacaccaaattgtacgtgggtccgactaaagttaacgtagatagtcaaacgatttattttttaggtttaaccgccctgcttctacgttacgcgcaacgcaactgcacacacagtttctacctggttaacgccatgagccggaatttatttcgcgtccccaagtatattaacggcaccaagttgaaaaacactatgcgaaaactaaaacgtaaacaagcgcccgtcaaagaacaattagaaaaaaagaccaagaaatctcagagtactactacgccatatttgtcctatacaacgtctaccgctctcaacgtcaccactaacgtgacttatagtgttaccaccaccgcaaagcgggttttcacatctacgattgcttatcgtcccgatagcagctttatgaagtccattatggccacgcagttaagggatctagcgacatgggtgtatactactctgcgctatcgagatgaacctttttgtaaaccaaaccgtaacctgaccgccgtgtcagagtttatgaagaacacgcacgtattgatccgtaacgaaacaccgtacactatttatggtactcttgacatgagttccttatattgtaacgaaaccatgtccgtggataacgcgacggctttcgatagtaacaaaacgacacccacaccgttaccggggtttcagagaacgtttatagatcccctgtgggactatctagactcgctgctgttcctagataaaatccgtaactttagcctccagttacccgggtatggaaatcttaccccgccggaacaccgccgagctgtaaatctgtccacccttaatagcctttggtggtggttgcagtaaagttctggaagcagcaatgtcgtagtacgatacaaaaagctcccatcagaatgagagcattgagcatagtccaccaggctgcaaagctggacagtgagagttcatacatatgcgatgtgcaatgtgcattgtaaaaatcatcgtgatcatgtcgtttcatcacattagggttgtgagtggtagaacccggtttagtactcgttaatgtggttgtggtcgtcgtaggtgttgtggaggttgttacgctggtagtcgattttaccgttgatacactagaactaggaggactcggtgtacttgcagaggttgacgtagatgagctgttaccataactccctgccgccaccgataaaaccaaaaaacttagtactcgtgttttccactccatcacaccaccgccacgatgcttacgatgttgaccgatcgaatcgactctcaactggtactgtcgcggctgccgcgctcccgttttcagcgattctgggagacccctacgttaataatgaaggaagagtccgcaccgtcatcaggctccatcatcctagccgagaaatccgtcaacatgcgttactgcgtacgtttcgctagcgatagcgattttcaaaccacatttacgctgccccaatcgaccgaggagaaatacgacaaagagcagcatccgggagaagatgaagcgtcgtcgccattaccgtcgccgctcaaagttccctacaagtggatgccttccagtttcatcgtcaaacaatgccacacgcagctggccttttacaataaacacatcatttggctatcacgcgagcgcaaagtgcccacctcgctgggcgtcagcctctatatccccgaaggttttttcggcattaccttttacaaatgcctggacgcgcaattcgtttgcatgcccgagctgctggaatccgggctgcaagtcccgcagttggatgttgtcaacctcaacgacacttttcagtccatctttccaggcaccatcgaaggcgatatcggcgttttcccctgttttgtgccagaaccttggcagctcatgaacttgccgccgcccaacgaacaccgtttcttttcattacgtacccgtcagacgctggtgatcggtccgggtcacacgcaaaccgtctattttgacgcggcctacgtgcacgcgcccggtatctgcgcccttatagtgggcgtgcgccagtttagtcagtcggatctcatcatccgacccactatctggctcccgggtaccgcggccggcgtgacggtggtcaacacttcgcacaccaccgtctgcatctccccacacaccaccgtagccaaagcggtttttaccacccaccgctttacctatctaccggtgggcagtcaccccctaggacagatgatcgtgccgcccacccccgacatcggtttcacccacacgcccgagcacgcgttgctgcaacggacaccctcgccggtagacgatgacgtcgacgagacagaagaagatgaaaagagctccgacgcagaaagccctgtcaacacgagtgacgttatttttgacgtcggcccgaaacctccccgtcatccctgacctaataaagtacgtctatgagaaaccccgtactcgtcgtgtccgtgatcacgtacgttttccaaaacgtgccaggctgttcacgcggaggacagcaaggccgccgccgtgggtttctttttcttcacgcccctgagttcacgcgcggaacccacaaagggtatctggggaggaggtatggtgaccatggtcggtgacatcaccgcctcccgaggcacgtcggggctgtgtcgcatgagatccaaaatctcgcgttcgtgattcgtaggcagcgtctcctgcggcgccgactccttgtagcgccgacggtgagacccgcgtccctggggctgctgctgcacgggctcgaccggcggctgctgttgcacgggctcgggtgacggcgacatcacggtcacttcatcctcctcgtcgccctcttccagcagccgctggtcgaacctcataacggtgggacaggagacggtgttaatgtgagccaaactcatcataggacgcgtgacccccgtttcctcggggatcagcgagtccgaaaccgagggacaggcaaaggccgacacggcggcgaccgtttccccgtcctcgcggacgccgctttccccctgaacgaccgccggtggcgtcggtggtgcaaccgtcgcagccacgccggcctcgagcatgtacgcgcttttctcgcagtccatgtccaccaggcccataacgcgctgcacctccaccagcgaggcctgatccgtggagaacttgtccagcaacatctccaggctgtcggcctcggacatggcaaactcgcccaccaccagtttgaggatgagaatgtccagggcctctaggatacgctgcgatttcttgcactccacctcggccgccggccgcgtgtgaggcaaacagccctccgagagatagcccttgagaaacgcgcacttgctctggcattgcctatagagcggcagcagcttcagcaggtggttcaccacgtccgtgtcgcgagaaaaggttcgtaggtcggccggggtgatctccagctgcttaaagttctcgtccagaaacgcctgcagctcgcgcagctccacgtcctcgctaggctgcagcagcacgtaatcggccacaggcgcagctttgcgacggcacatcagcagctcgcacaggcgctgggccagctgcatcgtgccggcgcgacgatgacgctcgttctgttcgcaacagagtatgattctgctcatatagtcgccaacgtactctcgcagacaccgacggaccactgcgtcttccccctgctggtcaaacaccaggtctcgcgacgtgtttatttctgcctacagacgcaaaagtgctcggactcgcgacgggtggcgcccgtcttcgccgtgaacaacgaaacgctgcagctctcgcgctacctggccgcgcgccagcccatccccctctcggcgctcatcgccagtctggacgaggccgagacgcaaccgctctaccggcatctcttccgcacgcccgtgctctcgcccgaacacggcggcgaggtgcgcgaattcaagcacctggtgtactttcaccacgcggccgtgctacgtcatctcaaccaggtcttcctctgccccacctcgccctcgtggttcatcagcgtcttcgggcacaccgagggccaggtgctgctgaccatggcctactacctattcgagggccagtacagcaccatctccaccgtggaggagtacgtgcgcagcttctgcacgcgcgacctgggcaccatcatccccacgcacgcctccatgggcgagttcgcgcgtctgctactgggctcgcccttccgtcagcgcgtgtccgctttcgtggcgtacgccgtggcgcgcaaccgccgcgactacaccgagctagagcaggtggacacgcagatcaacgcgttccgcgaacgtgcgcgtctgcccgacacggtctgcgtgcactacgtctacctggcctaccgcacggcgctggcacgcgcgcggttgctcgagtaccggcgcgtggtggcttacgacgctgacgcggcgcccgaagcgcagtgcacgcgcgaaccgggttttctgggccgccggctttccaccgagctgctggacgtcatgcaaaaatacttctcgctcgacaactttctacacgactacgtggagacgcacctactgcgtctcgacgaatccccccactcggcgaccagcccgcacggtctgggactggccggctatggcggccgcatcgacggcacgcacctggcgggcttcttcggcacctccacgcagctggcgcgccagctcgaacgcatcaacacgctttccgagtctgtcttctcgccgctggaacgctccctgtccggcttgttacgtctatgcgcctcgctgcgcacagcccagacctacaccaccggcacgctaacgcgttactcgcaacgtcgctacctgctacccgagcccgcgctggcaccgctgctggagcgaccgctgcccgtctaccgcgtacacctgcccaatgaccagcacgtcttctgcgccgtggcctccgaaacctggcatcgcagcctctttccgcgcgacctgctccgtcacgtacccgacagccgtttctcggacgaggccctgaccgagaccgtgtggctacacgacgacgacgtggccagcaccagccccgagacacagttctactacacgcgacacgaagtcttcaacgaacgtctgcccgtcttcaattttgtggccgactttgatttacggctgcgcgacggcgtctccggtctggcgcgacacaccgtctttgagttatgtcgcggactacgacgcgtttggatgaccgtatgggcgagcctctttggctacacgcaccccgaccggcacccggtctatttcttcaaaagcgcgtgcccacccaacagcgtgcccgtggacgcggccggcgcgcctttcgatgacgacgactatctcgattaccgggacgagcgcgacacagaggaagacgaagacgggaaagagaataaaaataacgttccggataacggcgtttttcaaaaaacaacgtcctccgttgacacgtcacccccttactgccgctgcaagggcaaactggggctgcgcatcatcacgccgttccccgcctgcaccgtcgccgtacatcccagcgttttacgcgccgtggcgcaggtgctcaatcacgccgtctgtctcgacgccgaactgcacacgctgctggaccccatctcgcatcccgagagcagcctagacacaggcatctaccaccatggacgctctgtacgtctgccctacatgtataaaatggaccaagacgacggctatttcatgcatcgccgtctgttgccactgttcatcgtgcccgacgcctaccgcgaacacccgctaggctttgtgcgcgcccaattggatctgcgtaacctgcttcaccaccacccgccgcacgacctgcccgcgttgcccctgtcgccaccgccacgcgtcattctcagcgtacgcgacaaaatctgcccctcgaccgaagccaactttatcgagacgcgctcgcttaacgtgacgcgttatcgacgccgcggtctcaccgaggtgctcgcctatcacctgtacggtggcgacggcgccactgccgctgcgatttccgacacggacttgcagcggctcgtcgtcacccgcgtgtggccgccgttgctcgagcacctcacgcaacactacgaaccgcacgtcagcgagcagtttactgcgccccacgtcctcctctttcagccccacggcgcctgctgcgtggccgtcaagcggcgcgacggggcgcgcacgcgggattttcgctgtctcaactacacgcaccgcaacccgcaagagaccgtgcaagtgttcatcgacctgcgcaccgagcacagctacgcgctctgggccagcctctggagccgctgtttcaccaaaaagtgtcactccaacgccaaaaacgtccacatttccatcaaaatcagaccgcccgacgcgcccgtgccgccggcgaccgccgtctgagcctcactttccacggcgccggtgacccgccccccggcagcggtctcatctatatatacatcagcgtgcccgaacgtgaccttcctagcgacggcggccatggagctgcactcacgcggccgtcacgacgctccgtcgttatcttccctgagcgagcgcgaacgccgcgcccgtcgcgcacggcgcttctgtctggattacgaacccgtgccacggaagttccgacgcgagcgaagtccaacctcgccgtcgacacggaacggagcagccgccagcgaataccatctcgcggaagatgccgtcggcgccgcctcgcatcatcaccgaccctgcgtccccgcacgacgaccccgctacagcaaagacgatgataccgaaggcgatccggaccactatcctcctccccttccaccctcctcccgccacgcactcgggggcaccggcggacacatcatcatgggcaccgcgggcttccgtggcggacatagggcgtcctcctctttcaaacgacgcgtggccgcgtccgcctcggtgccccttaaccctcactacggtaagtcttacgacaacgatgacggcgaaccgcaccatcacggcggcgattcgacgcatcttcgtcgccgagttcccagttgccctacgactttcggttcttctcacccctcctcagccaataatcatcacggatcgtccgccggaccgcaacaacaacagatgctggcgcttattgacgacgaactggacgccatggacgaggacgaactacagcaactcagccgtttgatcgaaaagaaaaaaagagcgcgtctgcagcgcggcgccgcctcgtcgggtacctcaccgagttctacctcgcccgtctacgaccttcagcgctacacggccgagagtctacgtctggcaccctaccccgccgatctcaaggtccccaccgccttcccgcaagatcatcagccgcgcggtcgcatcctgctgtcacacgacgagctcatgcacaccgactacctgttgcacatccgtcaacagttcgattggctggaggaaccgttgctgcgcaagctggtggtggaaaagatcttcgccgtatacaacgctcccaacttgcacacgttgctggccatcatcgacgaaacgctcagctacatgaagtaccaccacctgcacgggctacccgtcaacccgcacgatccctatctggagacggtgggcggcatgcgtcagctgcttttcaacaaactcaacaacctggacctgggctgcatcctggaccaccaggacggctggggcgaccattgcagcacgctcaaacggctagtcaagaagcccggtcaaatgagcgcctggctacgcgacgacgtctgcgatctgcagaagcgtccgcccgagaccttctcgcaacccatgcaccgcgccatggcctacgtgtgctccttctcgcgcgtggccgtctcgctacgccgtcgcgcgttgcaagtcaccggtacgccccaattttttgaccagttcgatactaacaacgccatgggtacctaccgctgcggcgctgtctcggacctgatcctaggcgccctgcagtgccacgagtgtcagaacgagatgtgcgaactgcgcatccaacgcgcgttggcaccctatcgtttcatgatagcgtactgtcccttcgacgagcagtcgctattggatctcaccgtctttgccggtacgacaacgacaaccgccagcaaccacgccactgccggcggacaacagcggggaggagaccaaattcatcccaccgatgagcaatgcgcaagtatggaaagcaggacggacccagcaacgctgacagcctacgataaaaaggacagagaagggagtcatcgacatccctctccaatgatcgccgccgccgctcctcccgcccagccaccgtcgcaaccacagcagcactactctgagggcgagctggaagaggacgaagacagtgacgacgctagcagtcaagatctggtacgagccacggatcgacacggggacaccgtcgtctacaagacgaccgcggtccctcccagtcccccggcgcccctcgccggtgtccggagtcaccgtggtgagcttaacttgatgacgccgtcgccttctcacggcggcagtccaccccaggttccccacaagcagcccatcatcccggtgcagtccgccaacggtaatcacagtacgacggcaacccaacagcagcagccgccgccgccaccaccggtaccgcaagaagacgactcggtggtaatgcgctgccagacgcccgattacgaggacatgctgtgttacagcgatgatatggatgactaaaaagagagtgaagggtgttgtgcgtgatgattgctgtcccttatcccgttacaaagaaaagaaaaaatggtgttacacactccttggtactactatgacccgtggtgagatatccgatgatgataatgatgtacgcgtgcctgagcttggtgtttttttctctctgtgagcttttttccccataagctgtgtactgttcgtgtccggaccccatacacggtttccgttaatgacggccccctccttttcccccaccgtaaaaaaaaaaacaaagcacaatacacatgtggttttttggttcgaatcgagcttggcgtttatttcttctcgagccccacgtcctctccctcccattctttttatatatacacatgcccaagattgggggggaacgtgtgtcgtttccaggtcgtggtgacgatgatgatgtggtttttatcggggtggtagtacaagggtttgctactgtagtcgaaaaggtgggccgagaacatagaggaactaactcctaagcgatggctcaaaggcggatgagcaaatcattaaaatccttgactgtctatggttatgcaaaaggatatataaagtataaatagcgtatataaaaacatatatctatgtacaagacgcatgggataaataacacgtatttacacatttttctgcacatgtacaacatttgaggacgaggagacgacgaccggccggtcgccgccgccgcggttgctactactttcttaagtgatgcgaattggtggctatggtgaggagtttggaggaaataatatacatcatatattctgatgacagtgtagtaaacatttcactggcttcggcccggtgcgacggagggccccgacgtcccctctcccggaggggggaagaggcacgacgagcgagggccccgtcgtacgaggaacaagaatcttcttcattctttcacagtaaagcacatttctttatgtggggacgggaatcgatgtcatttgtgtatttgcattcggtagagagctacagtctccagtttcacgatcgttgtgcatcatacaacgacactttttatcctacaaatttcacacctatctatatacacacaatataaggttatagcatcatctagtttgttcatttcatacctgttgagaacgtttatgttctagcaattgatttcgcgtcatagggctgtgacggtgattcttcagagaatcaggaaaaaaaaaaagaggctcaacgagcaccagagactaagtcggaaaactcgcgcccgcttccccggacggtttcggcttagcctctggcctgcgatggtttttttattccaagttcgttccatgaatagagcgttatacgattgtgttttcgtgtcattcagacgtggttgatcatgttactacgtgtgtgttttttgctttggtcggtacacggtccctttcagcggacccagtgttccttggagagacgaaaagcgagcgtgtttcacgagatggctgatgccgagtgtcgtcgacataagtcattttctaaagaagcaacataaaaaaaagatgatgtggttcgtcgtactcacagtctcgtttagctactatagatattatagatccagagagcgtaccgcccgagagaacaccgtcttctccgggacgtcttgccgtcgtccgtcacccgggcgtcgagatgttcgtagagaacgatggaggacgaccaacaccgacaggtggtgctcatgagggtgtggtgtcgatggtgcgtttttttgcctcggcacgaccgtatttgcccgtcttaccgcacctccggaaagatggtgtttttacgcaggtgggtgaggcagtttttttttttcagatgacaacgatggtaccgatagagcctgagatgatgatggctacgaaggacgggcggacgggcaaacgatggtgagaggtcgccaccgaggggtgcctttttttttctggtcagatggaacgtcgtcggtctcgagcgccccccgatgtagggccgctctcttacgtatcccgggtcgattcagaccgacaaaaagagcgtccagagacgcggtctctttcttctcgaacggaaagtccgaatcctacacatttctagtcgtgacggctagttttttggtggtcatggcggtggtggtcaacatatatctccagatataggagatgaggaaaaaaaaggaggacaagtctaacggaataatatccgatcatatatatggagggatatcaggtcatcattgtgtatcaaaagatgatttgtacaacagggaaggatacggttttaaaggttagtgcagagaaactatataaagagcgtataacatggagttcattctgtcattaaaaaggttctaagtagagcatattaaaaatagacgagagctagagttttattcttggttcatcatatattttgtaaaaaaaaaatatagaaaaatataggtgccggacgccggctacgtcccagtccggggcttcgcgcacccaaacgcaggtttcccccgttttcaaacacctcaagatcttttgagaaacacatatttttgttatacacagtgaaaacgtggggggacagagttccaaacacgtgtctatcaagcaaaaattcagacgatataaatatggagagttttttcttcttatacaacagcgacagttcggtgtacatagcgtataatatatatataggtcacatacagacttatgagctttttaccaaacagatgcaaatcgcctaccggaggcgggatcgggcgtgaggttctggctgcacccgcccgatccctcgtcggcttctccggcggctgtcctaaaatgactaggttcgtatatagagctataggtctttcatgatactgatgagaaatctatggtttgcgcgtcttatctgaatatatctagcacgatatagacgatacacgtcaagatcattgtatcacttcttttcgtctacgtggtaagagtcttggatactaaatatgtatataggcagcatttatagtttcaaaggatagaagatagtttttggacactgatagatatggcgttgttgagcggttgtgttggatgaacttgtcatcattctgtattttttcacataaggtgttcttttcttcgagcagtttataaaaggggtcaggcgcgatgactagagggcgcactttgggtgcggtcctccatcgcttgtcaacaaccggatgtgactcagcgagcacgagatggtttgacgtcagcgaccgttagccctcagggcgaaaacaggaagagtcgcctcgacggcgccctctaggtagcatcacggaacaggcggcgaccgcggactcgcctcggccaggggggtaccgaggcggtgcccgcgactcgcccctcctccaagatggcgccgctcggccagactcgtcgagattttcagggctatcattttttcgctctgagcagaaaaaaagctcttcaaaaacgtctcaaaaaagcacagaaaagttatcgtgctatttttttacccgcctggagcgaaaacgctcctcggctctcgacaccattttctctcgtccgccatgtcggagctcagaacggcatgacgagcgagagaaccgtcgagaaggtcaccaagatggcgccggttggggtgcagtcaaacggtgttttacagtttcggggccacttgaacagagaaaggtggggaattttgagggacacggttttgtcgggtgggggagaaaatcacgccctgccgtcgtattgccgtctcgaattttttcggccgtctgcacccgtatcggttcacgggttttccacggcaaatcggagaagggaaaaaaggtggggcctgttcccttcccgggtctcggacgagtcgacacgccgggtgggacggtcgtggtctcctcggcccgtgccgggaccctccccgtggattcacggtgttccggacccctccaggaaagggtggaaaacgcgtggagcccacggggacgtgcgttcgtaccggggaaaaacccgactgggcctgaaccaacgtcgggtgaactgccgggcccatcgtgtggggacggtgattgtggaggggcgtactgacggcaattgaggtgtcatggcggcccaccgtcgaccccgagcgcttccggccacacccaacctcgccgccgcatcggccagcacacacgccacagcctggtggggtccgaggcgccgaccccggctgggcggccgatggggggaggggagtggggagaccacgcccagggccagcaaaccgcgacggttcgggcggagtttttggggagcagcgggggaggggagcgtcacgggaccggccaacgcccagggtaaggcggaccgagagccggcggctaggccgagggacccccgaccacaaccggcgaccggaccctcgagaggggggaggggagcccaaccggagccgccgagagggagccgccgcgagacccggaagccgtcgcggtcgaccccgctcccggagctcctgaccgggcccccagcccccaaccctccggggccgactgccgtcgagccggggcgtcgcccgtccccaccaccgtccgcccggcccacctaccgtcgtcggccggccgccgcgacccccagccggaaaaaaagcccggaggggcccaaaagccagcggggcgagccgggaaggggagctgggtgggggatccccggtcgcccaccgcggaacgagcctaggaaccggggtccgcgacccagccccccgtggggggaggggaagggcgcggaccccgggtcccgtccgttccgcggcgggtggaccgggaagccggcggaggtcgccgggagcagcgagggatcccgggccggagcccggggaggagcggggtgggggtgggaagcccccgctcgggtccccccgggccgcggacgggaaccgggaccccggtgcgggggtcccagcccggccgggccgtcggatggggggtcgagcggggggaggggagggacccccggccgaggtccggagcgggccgcgcccggtgcccggcccacggccccggatggtgctccagggcggtgggacgggcccgcggacggaccggcgccgggcctcggccggggagggtggggggtagggcgggaggcaggcgggagcgggcgcagcgtgcggaccgcagcacggccggaaccctgccgcggactgcgccggggggcggcgggcacgccgggttttataggttttcagaggccccgcctaggtgggcggagcggtaattttccaccgccgcggcccatgcccggcacggggctcgcgctccctaggtgcggccgcccagtggaaaaataccggcgcatgcgcacgacgcgcatccaatggaaatttaccgacgcatgcgcactgaccgcctccagtggaaaaatactggcgcatgcgcacgacacacacccagtggaattttaccggcgcatgcgcaggacgaccctcccgcgggccaggacccgcgcatgcgcaccggggcccctggttcaccccactttatatataagctctccatacggcatccccggcgcatgcgcactcgagtccccatcccataatccgcgtggtaacgccctggtaaccgaaaattcgccccgactgcgcatgcgcacggaaacgccgtcccattggaaatcatggttgcccaaatttggtaaaaatttgccccccccggttccggaggagaagggggggggtgaggggggggggttacggtggttcccgttccgccagtccgttttcgtagaacgtttcgttagaagaattatgctatatagggtatgcatcctaggggtggaagctaggctccgcccctacggggcgtcgcctagcatccggtatacgtaaaacggactgatgacgtagctcgcttcgctcgctacgtcatcagagatgatttccgccggaggtgacgcacgcatacgtgacgtagctcgctacgctcgctacgtcaccgtatgtccggaattccacaggatgacgtatatccggagtgggtgtggctacgcgagtgtgacgtaggcttgtcaggggtcacgtgagaagcggcggcgttaagtttactaggccaaaacagaggaagggggcggataccctaggtaagggggcgtgcacgtagccctgtagacactcccccctagggtccagtagcttatgacgcgtatccgggagtagcgtctacgtcagcaggtgtatatttccggtagacggagaagcctgtacgtacaccgaggacggtggaaccctaacgggttccacctatctgaaatttccgtacaaggggtggagtctagggaggggtcattgtatatccgtttctgtgattggtagataaggtggcgtacctaggggtgtggctgtatacgtaagcggatatggctacacgtaatgggtgtggcttcactagggatcgctgtattctaccgcgcgcgtgcgcgcgtgcgtgcgcacacgcgtgacgtaacaaatcaccttgtgattatgacgttggtatctggcaccgcctcttgggcggttctacgggcctcgcttcctgcgctgatggtcacgtgaccaggaaaagtgctcaccgcctcgccggccacggggttgatgcctgttcttatgccgacaccagatggcgctcgttgaccaggaaagctgtctacgcgggttttacagtgtgtttttgcgtcattgtgacgtagagccggcgatcgccacattcgatggtgtacgctcgccgccagatgtcgtcagattgtacccaaaaccccgttatgagtacacgctggcttccgcattcttgggcacggcggtttcaggttacattacatcaagacgcgacaacgccccgaataaaaacaccgggcaccgttatgtatacacgacgtcgatactgatcgccgtagtgacgtcagtcgacacacaacaccgttccccatcacggtgtttcatggcaatgggcgaaagttactttttacaagacgaaaaatgtgttttttggtaaaaagagggggatgggaaaataaaaatacacaattttaaagttcggatcttttcctgttttattgactcgtaaactgtaaggtcttcgagtacgtgtcgggggtctgtgccgcgtacgtgttcgggaaaccacgttacgtggtttgtgtcgtgttgtgacgttgggataatacacaggtttggcgcccgtaggcgcgcgggtttttggggtgtgtagcttgtacggcgttttgtcggcggagcgcagcgaaaatcggtggtgatagcggcgattgaggttgcgagaccagattcatcgcgcttgtaccaccgtggtgcggtgtttctgcttgtaaaccgtcaggcggttctttgtgatttaaaaacaccgtgttcgtgaaacgtgacttttcacggtttgttagctgatgtgattttggaggtcacaaacaccgtacggtgttttcggggatcgggcttgggatttgcctgtgtataccggtgacggtaggacagaaaacaccgttttctagggacggtgttttcacgtgccctgtgtggggtttttatgtgctgcttgtgcgactgagtgggaaaacggattgtgatcggacggtgtgctgaggataaacgacgtgctcgactaccgacgttagttggcggtgacgcaaagccgtcccgaacatcacgctattttcgcgggcgggtgcgtcggctagcggtctggctgcgagaggctacccgaccgtagcggttagcttttcttacgaattgctgggatcgttgcggttgtcgcctttggtggtccgcaaccgcagccagaccgcagtggtggccacggtggtgtctcagacgtcgtgcgtcaaacatgacgtgctgaacttttccttggtataaaattcactcagtggcggcgtagccattgtcttccgttcatccaccatgagccacgaggaactaaccgcgctagcgccggtggggcccgcggcttttctctacttcagcaggttgaacgcagaaacgcaggagattctggccactctctcgttatgcgaccgttcctcgagcgtggtgatcgctcctctgttggcggggctcacggtggaggcggatttcggcgtctctgtgcgtacgcctgtgctttgttacgacggcggggtgctcacgaaagtcacgtccttctgtccttttgcgctctactttcatcatacgcaaggcatcgtggcttttaccgaggatcacggagacgtgcatcggctgtgcgaggacgcccgccagaagtacgcgttggaggcctacacgcccgaggcggatcgcgtgcctaccgatctggcggcgttgtgcgcggcggtgggctgtcaggcgtccgagacgactgtgcacgtggtggtgggcaacggcttgaaggagtttctctttgccggtcagctgattccatgcgtggaggaggcgaccacggtgcgactgcacggcggcgaggcggtgcgcgtgccgttgtacccgcctacgctctttaattcgctgcagcttgacgccgaagccgacgaggtctcgctggatgcgcgcagcgcttttgtggaggcgcgagggctctacgtgccggccgtaagcgagacgcttttctactacgtgtacacgtcatggtgtcaatcgctgcgcttctcggagccgcgtgtgctgatcgaggcggcgttgcggcagtttgtgcacgacagtcagcagtcggtgaagctggcgccacataagcgctacttggggtacatgagccagcgactcagcagtctggaaaaggatcatctgatgctgagtgacgcggtggtttgcgagttggccttcagttttgcctcggtatttttcgattcggcctaccaacctgccgagtctatgctcttttccgagtggcctttagtgaccaacgcaaccgatcaccgcgatctgatccgcgcgctgaccgagctcaagttgcatctctcgacgcacgtggccgccttggtcttcagcgctaattcggtgctctaccagcacaggctggtgtatctccagtcgtcggcgcggcatcccagcgccggcggtacggccagtcaggagacgttgctcaaggctattcagttcaccaacgggttgtcggcggcctgcgaagacgtctacaacgacgcgcgcaaggtgctcaagtttcaaggcgcgccgctcaaggacgaacgctatgggccgcagcatttggcgttggtgtgtggcacgtgtccgcagctagtttcgggcttcgtctggtatctaaatcgtgtctcggtgtataacacgggcttgtcgggttcgtcgacgctcacgaatcacctggtgggctgcgccgcggggttgtgcgaggcctgtgggggtacttgttgccacacgtgttatcagacggccttcgtgcgggtgcgcacccgcttgcccgtggtgcccaagcagcccaagaaggagccctgcgtgatcaccgtgcagtcgcgttttctcaacgacgtggatattttgggcagcttcggtcggcgttacaacgtcgacgccaaggacgggggtttggacggcaaaggtgacgacggggttccgggcggcggtgctggcgggggtggtggacgagacgtgagcgggggcccgagcgacggtctgggcggcggtcgtggtggtgggggtggcggggattccgggggaatgatggggcgcggcggtcgcatgctgggcgctagcgtggaccgtacctatcggctcaatcgcatcttggattactgccgcaagatgcggctcatcgaccccgtgacgggcgaggatacctttagcgcgcacggcaaaagcgactttgtggccgtcttttcggcgctcaacaagtttgtggacgacgaggccctgggtttcgtttcggaggtgcgcctcaagagcagccgcgacgaggtggcgggcgccacgcaggccttcaacctggatctgaatccctacgccgtggccttccagccgctgctggcctacgcctatttcagatccgtcttttacgtgatccagaacgtggcgcttattaccgctacctcgtacattgtggacaatccgttgaccaccaacttggtatccaaatggatgacgcagcattttcaatccattcacggcgcgttctccaccacgtcgtcgcgcaagggctttctcttcaccaagcagatcaagtcgtccaagaattcggatcacgaccgcctgctggactttaggctgtacgcgcagggcacgtacgccgtggtgcccatggagatcaagctctcgcggctgtcggtacccacgttgatcatggtgcgggtgaaaaaccgacccatctaccgcgcgggcaagggcaacgcgggtagcgtgttttttcgccgcgatcacgttccgcgtcgtaatccggctaagggctgcttgggatttctgctgtatcgacatcacgagcgactctttcctgaatgtggtctcccctgcttacagttttggcagaaggtctgttccaacgcgttgcccaagaatgtgcccataggtgacatgggcgagttcaatgctttcgtcaaatttctggtggctgtgacggctgactatcaggagcacgatctgctggatgtggcgccagactgtgtgctgagttacgtggaaagccgtttccataacaaattcctctgctactacggcttcaaagactacatcggctcgctgcacgggttaacgacgcgcttaacgacgcagaaccacgcgcagtttcctcacgtgttaggtgctagtccgcgtttctcgtcgcccgccgaatttgcgttacatgtcaagggcttgaagaccgcaggcgtgccggcgcccatggccgccactgtggcgcgtgaatcgttggtacggagcgtttttgagcatcgttccttggtgaccgtgcccgtgagcgtggaaaaatatgcgggtatcaacaacagtaaggagatctatcagtttgggcagatcggctacttttcgggcaacggtgtggagcgcagccttaacgtgagctctatgagcggccaagattatcgtttcatgcgccagcgctacctcttggctacgcgtctggccgacgtgctcatcaaacgctcgcgccgcgagaacgtgctttttgacgcggatcttataaaaaaccgcgtcatgctggcgctggacgccgagaacttggattgcgaccccgaagtaatggccgtgtacgagattctgagcgtgcgcgaggagatccccgcgtccgacgatgtgctcttcttcgtggatggctgcgaggcgctggccgcgtcgctgatggacaagtttgccgcgttgcaggagcagggcgtggaggacttttcgctggagaacttgcgacgcgtgctggacgccgacgcccagcgattgacggacgccgctgggggggaggtgcacgacctgtcggcgctcttcgcgcccagtggcgtcggcgcggcgtccggcgtcgggggtggcggtcttcttctcggcgagtccgtcacgggcaactccatttgcttcggcgtgcccggcgagacgggaggtggctgctttctcgtgaacgccggcgaagacgaggctggcggcgtcggcgggagcagcgggggcggcgggggcagcgggttattgccggccaaacgcagccggttgtaaccgccagcagacgccgcgacaacggccgccgcagccacgagcatcgcaacaacagcagcaacagtcgcagcccccgtggccgcttttcagaccgcaacaacagcagcaacaacagcagccaccgacacagcagcaccaggcgacaccgtatcagctaccgccgcaacagcggcgacagacggcgtcgcatcatcagcagcagcaacagccccgaaggttggcgccgcggcaccagagacagagaccgccgccgcgctggcaagctccgacattcgcgtcggcgcccgggccgcctgaggaaggggaggagtgtcagacacagccggtcatctccgagcccccgtcgcccgaggcggaggagccggcggcggcggtggtggaggaggttgcgccgcaggcggcggcaacagcgtcgggagcagaacccgcgtcgtcgacgacgtcgttatatattaacgtcaacgtcagtcggcatagcgagcggcccgcgagttatttgtgcaccgactccatgtctctggccggcgccagaccggacgacagcgtctcgtacgtgagcgagtcgagtcatggagatgaatttgttacagaaactatgcgtagtgtgttcgaaatgcaacgaatacgccatggagctggagtgtctaaagtactgcgatccgaacgtgttactggcggagtccacgccgttcaagagaaacgcggcggctatagtgtatctgtaccggaagatctacccggaggtggtggcgcagaatcgtacgcagagttcgctgctgacgctctatctggagatgctgctgaaggcgctgcacgaggatacggctttgctggatcgggcgctgatggcctactcgcgccagccggaccgggcggccttctaccgtaccgtcctccgtttggatcgctgcgatcgccatcacaccgtggaactccagtttacggacaacgtccgtttcagcgtcagtctggccacactcaacgacatcgagcgcttcctgtgcaaaatgaactacgtgtacgggatcctggcgccggaggccggcctggaggtctgcgcgcagctgctggagctcctccgtcgcctatgcggcatctcgccggtggcgcgtcaggaagtgtacgtcgaagggacgacatgcgcccaatgctacgaggagctgaccatcatcccgaatcagggccgctcgctgaacaagcggctgcagggcttgctgtgcaaccatatagcggtccaccgtccgtcaagccagtccgatgtgaatatccagacggtggagcaggacctgctggacctgacaacgcgcatcccccacttggctggagtcctttcggccctcaaaagcctattctcttcttcatcggcctaccacagctacatccaggaggcggaggaggcgctgagggagtacaacctgtttacggatataccggaacgaatatattccttgtcggattttacctactggtcccgtacctcggaggttatcgtcaagcgggtgggcatcaccatccagcagctaaatgtgtatcaccagctgtgccgggcgctcatgaacggcatcagtcgccatctgtacggggaggacgtggaggacatcttcgtgctcggggaaaaggcgttggacggggaggagcgcatgttcgtggggtcggtctttgccgcccccaacaggatcatcgacctcatcacatccctcagcattcaagctttcgaggacaacccggtgttcaacaagctccacgaaagcaacgagatgtacaccaaaatcaagcatattctcgaggagattcgacgtccgctgcccgatggcacggggggcgacggccccgagggcgaggctattcacctgcgtggacgggaggcgatgtcggggacgggtacgactttgatgacggccagcaacagcagcaacagcagtactcacagtcagaggaataacggtggcggcggccgggcccgtggaggaggcaagaaagcggtagggggaggggcgaatgggcaggacggcgacggcagcgagaacggcttacgggtgcgcaactgcgacgaacacgaggctctcgacttggtggacgcgcgttcccgcatccacaacgtcacccgcgaggtgaacgtgcgcaaacgcgcctacctgcagaaggtctcggaggtgggctatggcaaggtgatccgttgcatcaaaacgcaggagcgtctgactagcaagctcatcgatgtcaacctagtggggcccttgtgtctggactttatctctaagctcatgaatgggtttctgtaccgcagccaataccaccaggaccaagacgtggtggacgtgggggatcagttcacctacgatgagcacctgtatgtggtcaataacctgatccacaagagtctgcctgtggaatccctcccgctactgggtcagcagatctacgagttgtgtaacgggcccctcttcacccactgcaccgatcgttatcccctctctcacaatgtggacatggcctatgcctgcgacaacgcgggcgtactaccccacgtcaaggacgatttggtcaaatgcgcggaaggtaccgtgtatcccagtgagtggatggtggtgaagtatatgggttttttcaatttttcggactgtcaggacctaaacgtgctgcagaaggagatgtggatgcacgtgcgggagctcgtgctctccgtcgcactatataatgaaactttcgggaaacaactctcgatcgcgtgcctgcgcgacgaactgcacccggacagagatgtgattctcacgtataacaaagagtggccgctgctgcttcgtcacgaaggaagtctttataagtccaaagatctatatctcctcctctacaggcatctgtccagaccggatgagagtggcgacgtgccaacagctcccgtggccaagccctccaccctgacggccgccgcggccgtctcgggtgtcttcagggagccggaccgaccttggctgccaagtccgtatccctcctcctcgactgcgggtgtttcccggagggtccgcgcgacacgcaagagaccacgacgcgcctcatcgctgctggatttggcccgcgacgaacatggaatccaggatctggtgcctggtagtctgcgttaacctgtgtatcgtctgtctgggtgctgcggtttcctcttctagtacttcccacgcaacttcttctactcacaatggaagccatacttctcgtacgacgtctgctcaaacccggtcagtctattctcaacacgtaacgtcttctgaagccgtcagtcatagagccaacgagactatctacaacactaccctcaagtacggagatgtggtgggagtcaacactaccaagtacccctatcgcgtgtgttctatggcccagggtacggatcttattcgctttgaacgtaatatcatctgcacctcgatgaagcctatcaatgaagacttggatgagggcatcatggtggtctacaagcgcaacatcgtggcgcacacctttaaggtacgggtctaccaaaaggttttgacgtttcgtcgtagctacgcttacatctacaccacttatctgctgggcagcaatacggaatacgtggcgcctcctatgtgggagattcatcacatcaacaagtttgctcaatgctacagttcctacagccgcgttataggaggcacggttttcgtggcatatcatagggacagttatgaaaacaaaaccatgcaattaattcccgacgattattccaacacccacagtacccgttacgtgacggtcaaggatcagtggcacagccgcggcagcacctggctctatcgtgagacctgtaatctgaactgtatgctgaccatcactactgcgcgctccaagtatccttatcatttttttgcaacttccacgggtgatgtggttgacatttctcctttctacaacggaaccaatcgcaatgccagctactttggagaaaacgccgacaagtttttcattttcccgaactacaccatcgtttccgactttggaagacccaacgctgcgccagaaacccataggttggtggcttttctcgaacgtgccgactcggtgatctcttgggatatacaggacgagaagaatgtcacctgccagctcaccttctgggaagcctcggaacgtactatccgttccgaagccgaagactcgtaccacttttcttctgccaaaatgactgcaacttttctgtctaagaaacaagaagtgaacatgtccgactccgcgctggactgcgtacgtgatgaggctataaataagttacagcagattttcaatacttcatacaatcaaacatatgaaaaatacggaaacgtgtccgtcttcgaaaccagcggcggtctggtggtgttctggcaaggcatcaagcaaaaatctttggtggaattggaacgtttggccaatcgatccagtctgaatatcactcataggaccagaagaagtacgagtgacaataatacaactcatttgtccagcatggaatcggtgcacaatctggtctacgcccagctgcagttcacctatgacacgttgcgcggttacatcaaccgggcgctggcgcaaatcgcagaagcctggtgtgtggatcaacggcgcaccctagaggtcttcaaggaactcagcaagatcaacccgtcagccattctctcggccatttacaacaaaccgattgccgcgcgtttcatgggtgatgtcttgggcctggccagctgcgtgaccatcaaccaaaccagcgtcaaggtgctgcgtgatatgaacgtgaaggaatcgccaggacgctgctactcacgacccgtggtcatctttaatttcgccaacagctcgtacgtgcagtacggtcaactgggcgaggacaacgaaatcctgttgggcaaccaccgcactgaggaatgtcagcttcccagcctcaagatcttcatcgccgggaactcggcctacgagtacgtggactacctcttcaaacgcatgattgacctcagcagtatctccaccgtcgacagcatgatcgccctggatatcgacccgctggaaaataccgacttcagggtactggaactttactcgcagaaagagctgcgttccagcaacgtttttgacctcgaagagatcatgcgcgaattcaactcgtacaagcagcgggtaaagtacgtggaggacaaggtagtcgacccgctaccgccctacctcaagggtctggacgacctcatgagcggcctgggcgccgcgggaaaggccgttggcgtagccattggggccgtgggtggcgcggtggcctccgtggtcgaaggcgttgccaccttcctcaaaaaccccttcggagccttcaccatcatcctcgtggccatagccgtagtcattatcacttatttgatctatactcgacagcggcgtctgtgcacgcagccgctgcagaacctctttccctatctggtgtccgccgacgggaccaccgtgacgtcgggcagcaccaaagacacgtcgttacaggctccgccttcctacgaggaaagtgtttataattctggtcgcaaaggaccgggaccaccgtcgtctgatgcatccacggcggctccgccttacaccaacgagcaggcttaccagatgcttctggccctggcccgtctggacgcagagcagcgagcgcagcagaacggtacagattctttggacggacagactggcacgcaggacaagggacagaagcctaacctgctagaccggctgcgacatcgcaaaaacggctacagacacttgaaagactccgacgaagaagagaacgtctgaaccaggagaaaaaaaaaactagacaaaaaatattgacacagagacttgtgatatacggggttaaactggatatctaggtgctgcatgtgtattttctttgtgattttgcttcgtaagctgtcagcctctcacggtccgctatgtttttcaacccgtatctgagcggcggcgtgaccggcggtgcggtcgcgggtggccggcgtcagcgttcgcagcccggctccgcgcagggctcgggcaagcggccgccacagaaacagtttttgcagatcgtgccgcgaggtgtcatgttcgacggtcagacggggttgatcaagcataagacgggacggctgcctctcatgttctatcgagagattaaacatttgttgagtcatgacatggtttggccgtgtccttggcgcgagaccctggtgggtcgcgtggtgggacctattcgttttcacacctacgatcagacggacgccgtgctcttcttcgactcgcccgaaaacgtgtcgccgcgctatcgtcagcatctggtgccttcggggaacgtgttgcgtttcttcggggccacagaacacggctacagtatctgcgtcaacgttttcgggcagcgcagctacttttactgtgagtacagcgacaccgataggctgcgtgaggtcattgccagcgtgggcgaactagtgcccgaaccgcggacgccatacgccgtgtctgtcacgccggccaccaagacctccatctatgggtacgggacgcgacccgtgcccgatttgcagtgtgtgtctatcagcaactggaccatggccagaaaaatcggcgagtatctgctggagcagggttttcccgtgtacgaagtccgtgtggatccgctgacgcgtttggtcatcgatcggcggatcaccacgttcggctggtgctccgtgaatcgttacgactggcggcagcagggtcgcgcgtcgacttgtgatatcgaggtcgactgcgatgtctctgacctggtggccgtgcccgacgacagctcgtggccgcgctatcgatgcctgtccttcgatatcgagtgcatgagcggcgagggtggttttccctgcgccgagaagtccgatgacattgtcattcagatctcgtgcgtgtgctacgagacggggggaaacaccgccgtggatcaggggatcccaaacgggaacgatggtcggggctgcacttcggagggtgtgatctttgggcactcgggtcttcatctctttacgatcggcacctgcgggcaggtgggcccagacgtggacgtctacgagttcccttccgaatacgagctgctgctgggctttatgcttttctttcaacggtacgcgccggcctttgtgaccggttacaacatcaactcttttgacttgaagtacatcctcacgcgtctcgagtacctgtataaggtggactcgcagcgcttctgcaagttgcctacggcgcagggcggccgtttctttttacacagccccgccgtgggttttaagcggcagtacgccgccgcttttccctcggcttctcacaacaatccggccagcacggccgccaccaaggtgtatattgcgggttcggtggttatcgacatgtaccctgtatgcatggccaagactaactcgcccaactataagctcaacactatggccgagctttacctgcggcaacgcaaggatgacctgtcttacaaggacatcccgcgttgtttcgtggctaatgccgagggccgcgcccaggtaggccgttactgtctgcaggacgccgtattggtgcgcgatctgttcaacaccattaattttcactacgaggccggggccatcgcgcggctggctaaaattccgttgcggcgtgtcatctttgacggacagcagatccgtatctacacctcgctgctggacgagtgcgcctgccgcgattttatcctgcccaaccactacagcaaaggtacgacggtgcccgaaacgaatagcgttgctgtgtcacctaacgctgctatcatctctaccgccgccgtgcccggcgacgcgggttctgtggcggctatgtttcagatgtcgccgcccttgcaatctgcgccgtccagtcaggacggcgtttcacccggctccggtagtaacagtagtagcagcgtcggcgttttcagcgtcggctccggcagtagtggcggcgtcggcgtttccaacgacaatcacggcgccggcggtaccgcggcggtttcgtaccagggcgccacggtgtttgagcccgaggtgggttactacaacgaccccgtggccgtgttcgactttgccagcctctacccttccatcatcatggctcacaacctctgctactccaccctgctggtgccgggtggcgagtaccccgtggaccctgccgacgtatacagcgtcacgctagagaacggcgtgacacaccgctttgtgcgtgcttcggtgcgcgtctcggtgctttcggaactgctcaacaagtgggtttcgcagcggcgtgccgtgcgcgaatgcatgcgcgagtgtcaagaccctgtgcgccgtatgctgctcgacaaggaacagatggcgctcaaagtaacgtgcaacgctttctacggttttaccggcgtggtcaacggcatgatgccgtgtctgcccatcgccgccagcattacgcgcatcggtcgcgacatgctagagcgcacggcgcggttcatcaaagacaacttttcagagccgtgttttttgcacaatttttttaatcaggaagactatgtagtaggaacgcgggagggggattcggaggagagcagcacgttaccggaggggctcgaaacatcatcagggggcttggacgaacggcgggtggaggcgcgggtcatctacggggacacggacagcgtgtttgtccgctttcgtggcctgacgccgcaggctctggtggcgcgtgggcccagcctggcgcactacgtgacggcctgtctttttgtggagcccgtcaagctggagtttgaaaaggtcttcgtctctcttatgatgatctgcaagaaacgttacatcggcaaagtggagggcgcctcgggtctgagcatgaagggcgtggatctggtgcgcaagacggcctgcgagttcgtcaagggcgtcacgcgtgacgtcctctcgctgctctttgaggatcgcgaggtctcggaagcagccgtgcgcctgtcgcgcctctcactcgatgaagtcaagaaatacggcgtgccacgcggtttctggcgtatcttgcgccgcctggtgcaggcccgcgacgatctgtacctgcaccgtgtgcgtgtcgaggacctggtgctttcgtcggtactttctaaggacatctcgttgtaccgtcaatctaacctgccgcacattgccgtcattaagcgactggcggcccgttctgaggagctaccctcggtcggggatcgggtcttttacgtcctgacggcacccggtgtccggacggcgccgcagggttcctccgacaacggtgattctgtaaccgccggcgtggtttcccggtcggacgcgattgatggcacggacgacgacgctgacggcggcggggtagaggagagcaacaggagaggaggagagccggcaaagaagagggcgcggaaaccaccgtcggccgtgtgcaactacgaggtagccgaagatccgagctacgtgcgcgagcacggcgtgcccattcacgccgataagtactttgagcaggttctcaaggctgtaaccaacgtgctgtcgcccgtctttcccggcggcgaaaccgcgcgcaaggacaagtttttgcacatggtgctgccgcggcgcttgcacttggagccggcttttctgccgtacagtgtcaaggcgcacgaatgctgttgagaaacagcggcggcggtggtgactggggacggtgatgatgctgctgagactgagactggtggtgagagtagtggtggggctgcgtcgcctgcgacggcgggtggagatgaggcggcgtggactgggacgaggaggaggggccgcagccgttggtggaaactacgtgcaacggcgacgcggttaagggagaccgtatcgcgtaggacgacgtggcctcctcgtataggttgctgccgctggactgacacagctcctgaatgagctctttgtagcgctcaaaggactcgctcacgtcgttgggaatgtccatctcgtcaatcttgcgttgcaaaatagtcacgtcgatcttgacgctgctggccgagacggcgtgacacagcacgctgataacgacgtggtcgcgcacgatgttgagcgtgacgctgtagtcttcgcgcgccgccgtgagcatctgcgtgatgcagtcgcaggggatgtgcacgtcggggttttcgaagatgacgtgcatgtgcaaccggccgtcctcggcgtgcataaagggcacgatgtcgtggttggcggcgtgcagcaggtaataaatttggaagatgggcggctggttggtggagagcttgagtagctcgctgctcttacagaacccgtaataaaagtttctatttttcatgatgttggacgtctgattgatgaaggccaccatggcgtcggaggcggtgggcaggatgcggttgtcctcgcacgaggtgcaggcgatgcgcgagacctgctcgttgccgtacggcgagatgtcgaggcaggtgtgctgccggtgcgagtggaaattgaagggtaagcagatggactctttgcccgtgatggccatcttcatcatgttgaggtacttgagctccagttcggggtgctcgcggaagatgtcgtgcaggtcgtgcagcgtgaggcgcgggcgcgcgtcggccggcgacggcggttcgccgtggttgttggccgacgtagcgccgttcaccgtcgacgccactttgctggccagctcgcgttggcggcgcttgcggagcagggagcgcaaggccgagcgtcgttcgcgcggcgtgcgcacgccgctcacgctagacatacttgtctatcacgtacgtggggtccaccagcttgatgtcgcaactctccaacagctgcgtgaaatcgcgcataaagtccgccaggtgcactttgcctttgtaggtgcgttttgtaatctgaaaggccttgaagagtgtgatgcagagccacacacgtcgcggaagtcgacttatatagtaattgtcgtgacagatggccagtttcacctcctggacgtggtgggggtgcaggcgtccgaagagcacggcctcgttggtgacgcggatgttgccggcgcactgcgggtcgcagaaaaagtgcttgtagatgcccgtgacgcctgcctgacgcaggacgtggcaaaataccgggtcgggtcgcgccagtgcgccgtcgacgccgctcaggccgtggtagtccgagtcgcctccgggcgaggtgggtgcttcgagtccacagcgcgccacgtcctcgtgcgccgcgccgagcggcgacgtgcattcgcgcaacagatcggccaataccagctgaatgcggtccaccatcttcacattgttctgacaatacgagacgacgcggcggtacagctcgcgcaggacgacgttatcgtaataggagcaggccatgagttcgcacagcagacacacggtactggtttggttcttggtaaaaaaagcgggtacgggacataggtaaatgggacccacgtttttttttagcgtgctctcgctgaaccccccgctggtgacaccgccgttgtgacggcccggatcgtctcctcctttttctcctccttcttcatcctcctcttcttctatcatcatccttgcgtcttctctttccgaggccgtggataacgcgtctagtcgcgcgaacttagtgtgcgtgagttccgtgagtggcgtggtgctcatgacgccggtgccggcccacatatagaaaagcagctgcacgaagcggtcgcggctaggtgagctgtgttctagaaagttgtcgatcagttcttgcggcacttcgacgtgataagggttgtttttttgcttctgttgcgggtggcgccgaggcttgttgtaaggcaccgtgtcttcgcccatgaccatggcccgcaccacggccagatggttcagggtgacattctcgttatcaaccgcgtcgcccacttgtttttcaaagcaacgattgatgaaaaagtgcaggtggaaatcgaagaccgtgagaacgtggtgtcggaacaggtcgtcgatgcgcagatcggaaaagtgctgctgcagcagatgcgtaaactcggacatgatgatgagcgtgctgagcgccgcacggggcgcgtaactgcatttgaagcacagcaagctgtactcgaggagccagctctggtcgcagtcctgtttgaggcagatgctgatgatggcgcataggttacagcgcgtgtcgatggccagcggcgcgcacagtcgccgcagttgttcaaagtcggccgccgaggtttcgaggccggccagttctgcatctaggtcgcaggcggccgaagcgccggcgggtcctgcgttgctactgccggcgacggctccgccgcagctagtggtgttggtcgcattggtgagtacggtggattgcgttccgccgcacgtggtttcttccgcacagcagttgagcagttcgtctacctccgaggtgccgaggctgagcgtctggaattcgtagtgacggtaacggttagcggggtgttgaggattcacctggtatgaggcggccgccgcggcggccagcgcttcgtccataggtacttgacgcgggtgcgcgtgccatagcagctcagttgtcaagtccgagtgccactgggtgtactcggtgctccagccgctgtaacgcgaaacggcctgtcgttgcggactgcacaaggtagcggcggtgacggagctggtggacggggccgggctggtcgggggaagaaacgtggtgtggggcccgtgagggggagtcgttgggccgttactgctcacgtgggtactcggattcatggcgatcggcgccgctgattgaggacgcggaaaaagaatgtcctgggctaagcagcgggtgccgtttctggacgatgacgacggagaggaggaaaacgacgtgaaggatgacgtggattctccggtgccgacgcgaccgctggtgatcgacgaggacgcggagcccgcggctggtacgagcggtgggctcgaggggggaggtggtgacgacgaggacggtgaagacgggcacgcgctacccgatcttgacgacgatctgctattacagttcgagccgatgctgccgcgcgtctacgatctgttgctgccctctctggacgcgcgcttaaatttcgtgaacgcgggtcagaagtacgccgccttcctcaagtacgtgcacggcgactgcgcgacctgcagtcacggagagatcctccgtgagaagacgcaactattaacggcgatcgtcagcaagctcatggacattaacggaatcctggagggaaaagacgagccggcgccgggtaaataaatcggcggtggcgtcggtgcgatggagatgaacaaggttctccatcaggatctggtgcaggccacgcggcgtatcctcaagttgggtcccagcgagctgcgcgtcaccgacgccggccttatctgtaaaaatcccaattactcggtgtgcgacgccatgctcaagacagacacggtctattgtgtcgagtatctgctcagctactgggagagccgcacagaccacgtgccttgttttatctttaaaaacactggctgcgccgtctccctctgctgttttgtgcgagcgcccatcaagctcgtctcgccggcgcgccacgtaggtgagttcaatgtgcttaaggtgaacgagtcgctcatcgtcacgctcaaggacatcgaggagatcaagccctcggcctacggagtgctgacgaagtgcgtggtgcgcaaatccaattcggcgtcggtcttcaacatcgagctcatcgccttcggacccgaaaacgagggcgagtacgagaatctgctgcgcgagctgtacgccaagaaagccgcctcgacgtcgttggcggtccggaaccacgtcaccgtaagcagtcacagcggcagcggtccgtccctgtggcgcgcccgtatgtcggccgcgctcacgcgaacggcgggaaagcggtcctctcggaccgcatctccccctcctcctcctcctcgtcatccgagttgctctcccaccatggtcgccgctggcggcgccgctgccgggcctcggccgccgccgccacccatggcggcggggtcgtggcggctgtgtcgttgcgaggcctgtatgggacgatgcggatgcgcaagcgagggagacgctgatgaagaggaggaggagttgctggctctggcgggagaagggaaggcggcagcggcagcggcgggccaggacgtcggagggtccgcgcgtcggcctctggaggagcacgtgagtcgtcggcgaggggtgtcgacccatcaccgtcatccgccgtctccgccgtgcgcgccgtccttggagcggactggttatcgttgggcaccgtcatcgtggtggcgagcgcgctccgggccatcgcgaccgcagtctgggccgtggctgcccgcgcgctttgcgactctgggcccgctggtgctggctcttctgctggtgctggctctgctgtggcgcggtcatggccagtcgtcgtctccgacacgctccgcacaccgcgactgatgagttccaccaggctctgcgccgtctcttcgcgcccctctgcgttcacgaggaccatttccatgtgcagctggtgatcggccgcggtgcgctgcagccggaggaagcggcggtagaaacgtcgcagccaccggcgcagtttgcggcgcagacgtcggcggtcctccagcagcagctggtgcatcacgtgccacgttcttgcgtccttcatctcttcgtgacggataagcgctttctgaatcgcgagctgggcgaccgtctctaccaacgcttcctgcgcgaatggctggtgtgtcggcaagccgagcgggaggcggtgacggcgctctttcagcgtatggttatgaccaagccctactttgtgtttctcgcttacgtctacagcatggactgtctgcacaccgtggccgtccgcacgatggcctttctgcgtttcgaacgctacgacgccgactacctgctgcgccgtctgcggctctacccgcccgagcggctgcacgcgttgttggacggtgtcaccgcctcgctgctaggtgaccttcaccgtttccttttcggggtggaccttcggctgcccgtgcttcaccccaccagctcgccgtgcttagcactgctacgcgccaagcgtttcgacgcccgcgctgatttggccgtataccaccgtaaccagtggcgtcaccaacggcagccgcggtcgccgcagctgcggggcctcatcgcagccttgcgccggcacgccgggcaggtaccctgcggaaacccgctctacgtactggcccgacaagcggtgcagacgttttgcgacacgtgtccgcgatacctggtgccgttgcgggcactgggtctgcacgacgagacgcgcggaggaggctcgacggcggcagctgcggcggtaggacacgcgggcgccggacagcaggcgcgtcacgtagagcccaccaagatcgtcctctttgcactcagcgccgcgctgcgcggcggcctcatcggcagcgtcatcgacctgccgctctggtgtctgtgtcgactcaagtgcgagcgccatctggacgcgcgctcgctggtggccgtggtctgtcggcagtgcggacactgcctcaacctgggtaaggaaaagctacactgccagcaaaactttccgctcaactcgatgttctattatcgggaccgtcaagaaaagagcgtcatcttcaacacgcacgccgagctcgtgcactgctcgctctgcggcagtcagcgggtggtgcggcagcgcgtctacgagctcgtctccgagacgctctttggacagcgctgcgtacgcgtgggctggaaagccgtgctgggcctcaacgcggcttgtgccgtgtacgatcaccggctggctttcgacgtcattctgccctgcgcggcacgcacctgcgactccactgtggtggtacgcgacgtgacggtcccgcgtctcctgcgcctcacttcgcacgggcacggcctgctgtgcgcgcgctgtcagacgggcgagtaccgcgacagctgtttggaaagcgaggacggcgccccgctgtgtcggggctgcgcgctggttaaacagaccgcctgccacgtcggcggccacattgtgcagcaggcgcgcggcggtttagcagcggcttcctcttcgtcctccccccacggcctgccccatgtctaacaccgcgccgggacccacggtggccaacaagcgggacgaaaaacaccgtcacgtcgtcaacgtcgttttggagctgccgaccgagatatcagaggccacccacccggtgttggccaccatgctgagcaagtacacgcgcatgtccagcctgtttaatgacaagtgcgcctttaagctggacctgttgcgcatggtagccgtgtcgcgcacccggcgctgacagcccaaggggaaaaggaatagcaagaataaatcaccgtgaaagtgatacgttgttttgtaacataaaaaaacgataaaaatcctattgtttttattacccgctactgtcagtgtcggttacaaaagatagagaaaccgcatgtgttgaatagtgtcctgtacggattgcgccagttgtcgcaggtccaatcgcactagccgcagtatttctagagcactgaggacgttctgcgtgagcaccgtgataggcggcgaggcgaaactggtgctggcggcgccgggcgccacggccacaagttcatctcggcatagtggtgtttctcccaatcggttttcttgaaagacggacccgccaaaggcggtagagactaatgcagagtcggctgtccttgatgtatcgtcttgtacgtgatctatctgtccgtcgtcgtctgcggccgcggccgctcgatgacgatgtcggcgcggcggctgctgaactcgcgcgatgggtggcgggttttcacgcaggaactgaatattgactggcacgcggttgaaaggtaccggcggtgttggagcggcgccagacgcagcgacgttgtccgcggatgagttatcatcttggtcatacagcgggaaggtggggaaggcctcgtccaacaccagccgactgtggtcctgttcgaacgtggagggcggtcgcagcacgcgtacgacggtgtggtcctgtgcgttgtaaatgactaggggaataaactctaagcgggtggggaaacgcaggtaatcgcgtagccgtctgatttgggcttgtagccagcagtgctccagcggcgtttcggtccacgtgtcctggagcagttgactgagattgagatcccgggagcgttggatgcggaggaagtcgcggtctcgcgacgtgtattcgaggtggcgcgctactagtatacgttggcctttcagcaggtcggctacatgcacgccgagacacacgggtatgccgaaaagccaggagcccagcgcgtagtctagggcggtttctgtttgaataaaaacatctaaaagtcccggctccgtggtcgtgtttgtgtctgtggtggttgtgtcctgacgtcgcacgcggatcatctgaagcaccggctctccggtggggagctgcggttgcgtgtacccctcggtcaccatttcgcattgttgcgtgaaaatctgaaacaacgtctgtaccaattcggacaccgaggcgtaggtctcggcgtactggggtttcagttctagccacagacactgcagcatgtcttgtggaaagaccagcgtggccatggcgtagagccatagcttgcctaggggcggtgtgcttttttgcgggcctacctggcacagttgctgtaccagtttattttcccaaaacagtttattgagctgcatggcgggccattgggtgggggtgatacagaaagccttgacctgttcggggaggtggtcggggggcattttgtgtgtgttattgactaccgcgtgtattacatcctgatgtaggtgagctgtgagggagggtagcgacatctgcaccgggtacttgaggacggtgtagatgtactcggggtacagagctgctatgagtacacaaaactcttggagactcaggcgcagtacggtgccgcggcccggtctctgttcccctacgtcaccaccctcgccgcttcctacgcgatcggcggccgtcagctcctgctgcgtgtcgatgcgctggtgccaggcggtgctcaccagataacaaaagagcttaaggttatgcaacgtgtgagtctccgcggggtgcgtgtggctctgatgctgcgtgaggtagggtcgtaggtcgtactgcgagatctgcggccagaaagtgcgcaatgtctgacagacggccacggctaccgtgatggctttataacgtgtggtgacgacgttcttgagtcctccgccgctacagcggcgccgccatgccaggggccggccatcgtctcgcagcgccaagtacttaaaggctacgttgccgtaatcggtgaccaggtgaatgggttcgccggcctgcgtgacgatttgccgcatgccgaagacgtctaccacttcaaggaaggtgtcgtggtgacgcgcgaagcataggcgacgcaggcggtcgcgcattatcagcacgggatcggtctcgtgcgttggcggaagcacgctaggaatgtcttccagcctatagactagcgatgagccgttgagcttgttgagcagatactggtgacccagctggacgtgtcgttccagcgcgttcaacccgcgtgtaaaggcgcccagcgaagtcgtcgcctgcggtttccgggggttgggcagggctccctcgttggagagacgcgtaccgcgtcgcttggctagttccgcaaaacgagtccgcagatcgcggatcttttccaactgcgaccgaaagtccagcccgtagctgaaggtctggattccgtgtaacagcgcaaagtattccgtcgccaacgtttcctgcagttctaggtcgcctagcgtctgacccaagcgctgcaacagttcctgcactttttgatgacgcgcggcgccgccggctacgcgtccgggttccagtcgctgccagaccgcttccaccgcctggaccatgtcgacccgcggcgtggacgcgccgttggcagtcgcctcttgatgctgtgcaataaaattttcacaggccgcgttttgttcgatttgatgcgctagtgtcacggcgctctcgacggcttgctgttgcaggttccggtagtgggtcctgcttccgtgatgcgggtgcgtagggtccgcggtgatttgcgcaagggcttcctccagaaaagccagcatccagcgcaccgtgcgctccgccgacaggtacggcagttgttgcgtggctttgcccaacagctcgcgaagtgtctccagcggcttttccatcagcgccttggcgtcgggggtggtcacgtccagtccgccgctcattttgtggcgcgtgaccagatcagtccacaggttctgcgccgtgctcagctgctcgtcgcgttgtcgcaactgcgtctgtactttctgattcagcagatcggcctcgtcgctgagcgctttccgggccgcgtcggcctgctgatctagcagcgttttgaaaacgggccgctggaagtcggcgggcgggggcgtgatccgacccgccagctcctgacccttgaagggtttctcgggtacacgcgtgacggagctgctcccgggatcctggcgcagcgagcgatctagccgctcgctagtctcggtcatctgttgtctagtctcttgtaattgttcctccatcttctgttgactgctgcggtagcgtgcaaagtcgccctcgaactcgctgcccgtgatggctgtagttggatcgccctgttgacacttctcgatgaactgcgcttgatggacggcgtgttgcagggcctgctgcgtctcatggatcagaagttgcggacccaaaatttggtccaagtggtttagcgaggcttgggtttgcatagccgcttctcggtgcgggtgacagcgccgctctacatcacccgtcagcacgccgtgcagacactcgttgattcgcccgtctagttttttgctcagctgctgcagcgccgacagcaagtcctggttgaacttgtctagtagcggttgggcgcgttgatctaggcccaagagcagctcgagtgtggcctccagtggttggtgcgggatggtggagagcatctcgcccttaacggcgtccaccacgcgttgcaaatcctgctgcacctttttttggtagccgtccagtagctgccgttgctgttcttcctgtttacgtttctccttgtctaaaaagtcttgcatcttggtggttaacgtttgttgcatttgatgcatgacacgatggctcggtgcccgggccaagacacgctgcacgtcctccacagaagttaccgtgagcttgccggcctcttcttgccattcacgttccagccgttccaggtgctgttcttccatctcgtgttgatatcgctcgtagagttccgttacctgaggtccgacgcccagtcgtccgaccatatgttgaaagaaatattcatgattacggaaaaagtaaaccaactcccgtaacgcttggaagcgtttttcggatgcgccggtaccggctttctcgatctgctccagtttcttgaccatctgcgcgtacgtggcgttggcggcacgcagatcctcacgttcatgcgagtcgggtggcagttgctgcaacaacagactgacggcgtcaaaaaacgtcggtcgcggcgactcgtcgcgcgccagtcgcatcactaatgtgtggaacatgctcagtacggcgttgatgagtcgcagacgcgtctgttcgtcgcgacgtaacatctcgcgtaattgtgggtgtcgcttgatggtctgttcggtgggcggatcgtcgtacgagagtccgtcgaggaaacgctgcgtttcctcttcctcttcgtagaggcggcttagcgcgagttgcgcgttctgtaggcgctgctgcacttcgggtagctgcaggccgcctagcgcttccagctgagctagctgctcctgtaccaaggccagtgtcagcgccgagccgcggctgcccgggtcgcgcaccagcgtctcgatgacatgaagcaggtcgtgaatctgcgtgaggcgaccctcgttttgctgcgtggcttgctggtacgcgtgtcgcagctgcaggatctcttgcagtagcggtacgttgtcgcgcacagtgcccgtcatgaggtagctcagttgttcgcgtatgacgacaaatccctcttcgtagctgccgtcacacagtttcaggtcgcgcaggtcgtaaaagagtctcagtacctgctcgacgacgcgttccatctgcttcaggtcctctaccggcaaaaagccgttgaggatgtgattgtgcacgcgcgttagcagctgcgtgctcagacggtccaggtccatctgcaactctagcattttggcgttgcccaggcgaaagagttcctgcttggcgttgtcgtccaacggctgcagcgctttcagaatttcgcgtcggttcagatcgctggcgtctaggtcgtgaatgtcgatgctggtgatgaggccggccaagtgctcgtaaacgccgtggtactcctcgcgttgacgttgtaacacccgacgtcgctgttcgatgacctgcgtcagacgctgaaagtctacgggtcgcaggcagacgaagctgtcgctaacgggcatcggtcgcttggttacgaaacgttgcagtcgttgagacagttcgttagtgggcttgctttccacgtagcgtagcatctcctccacccaggcgatgagcgccgggccgtgctgacgtccgtagggatcgaagacgacttgcatcttctccagcagtgcgcgatccagcgtcgagtacgtgcctttggtggtcttgtggctcaggtagtcgtgcatgcgccgcagatccaggccgtggtgcagccagttgagcagaaaggcatccaatttcttggataggcccagataggcgcgtaccgcctgctgcgccgccgattgcggaccgcaggggcgacgcagacacgagcgctgattgacggcatggatgatgagctgctggagacgatcggtgaggaaagcttcgtcgaaggacggcgccgtggccgttgccgcgttagcgccgctttcggtacccgccgcgtgcaacgtccaggcgctggtgttggcaggcaacggcggcagcgtcagagccttcaactcctgctctacctcgtcgacgagctgttggtagcggcccagggccggcagggccccttcgccgcagctgtaggacggtggtaccgcggacgaagaagaggccgccgctatcgctgaggaggaggaggcggtggccagtgttttggacgtcgtggacgggggtttctttttgcctccgtgtttgctaccgctgaggtccttgcggcgtttctcgggtgtttttttgggtgaggacgagggatcgtagacgggaatgctgggcgccacgccaggagggcagcccgggtcgacgatggggtcgggcagcggaggtaaggaaggtgcggcggtggtcgttgtcgccgccgtgtccgcgctttctcgaacgacgccggtgaggtcgatatcgcggtcgcgataggtggagaccaaacgtgcggcgatctcagcctctggcacggtcgccacatccagcatgtagagaaaaagggcctcatagtagaaagcgggcgatagctgcacgccgaagcccgtgagcaccatcagcacctgatggagaccctcgcagtgatacacggcggcgttgtgacattccgcggagctgtgcggatcaaagaccaacatgtggtcctcggtgaagaccacggcgcgcgccaacgagttgacggtgacgagtacgtaggtgggacgcggtttggcgtgcgcgtaccgcagaaagtcgaagatgcccggacacatgtagccgtccaggtcgcacgtctcggtggtgccgttgaagggccgcgagagcgcgtgcacggtccggccgaaccgcgactccaggcggcgcggcacttcgtcgcccagtcggtagaccggcagccgcccgccggcgggcagcttcttttgcaactcgcgctctagccgcgcgtccagacgcgcgccctcttccatgatggcgtccagcgcctcggtctgcaggacggcgctcgttccacccaggtgcaaggcgtgtaggaacatgatgccgttgcagacgcattgattgcccgctcgcgctccaaagcgagcgatgtcgccctggtggcagctggcctgcgtgactttcatggcgaggccggcggcagggacaccgatgtcgagccggcgggcgggtcgatcgaagacaagatgtcctgctgcgcctggcttacggggacgatgtaccagtttaataggtcgctcgcggccaggtgtgcgggttcgtagcgcgcacccaggacctccggtacggacgtcgcgcctgccgtcgattcttcgtgatcggtgtcgggcgtcatgcggagtcgcggcggttggggcgccgattcccagggcgcctccaagaactcgcgtaaggcgcgatccgcttcggccgccgccgcaacgcccgtgcccgcgggccaggtcatcggcgctagcgcgcgatgtcggtgcagtaggctcgttgcttccgtcagacagagctgtgcgccgcggcgttccaagttctcgcgacttagtacgtcaaagacggctagcgcgcgttgcaccgcagtaacgacggcgccattggaacgttgcgcctgctcgagcgccaatgtcacgcgtgtttccaacactttgattttggaggccgtctttttgagcgccttgctcatctgggccaccgtgcggtgacccttggcgtgtcggcttacttcctctgtgtcgctgctgatctgacgtacgcgcacgcgaacactcagcaggcgctcgttcaagccgcgcagattctcggccaacagccgatcgcggcgaaccagctcgcgcaactgttctacgaaacgcgtggtaggtacgcgcagtccgtactgaccctgtacctccacgtacaccgtcacgccgtcctccgagaggcgcgcccggccacgcgccagaccgaaacagagtcgcgtgtgtcgcagatagtttctcagactgccggcgctgctgcgcatcacgtcctcgatcagcgggttgacggtggtgtacaggttatgcgctacggagcgcgccatgagctcggccagcaggtccacattgggcgtgacgggtacaccgctgaggtgctcgagggtcgtggcgatgtcgaagacgcaatcgcgtaccgtcttaaaaaccgcggcgtcgatgtgcttgacgaaggtggtcaggttgtagatggagaccaggttctggtacagcgtcacctgctcgggcaacaatacacggcacagctgaatgagtgcgaaaagacgcggcgaacccacggcttgaaacaggccctgcgggataccaaagatctccgagaactcagttaccaccaccaactgcgcgaagatgctggggaactcgggatgatggctgaaggctagcagggaggcgtagttgacgcggccttcgttcagattaacgagcgcgcattcgcgtaagatgtctgagcgtgtgacgccgtcgagcggaggcaaaggcgaggccgcgccggtcgcgccgcgggacggacgcaaggtaaacaagtgcacgccccacttgctgtgcaggtcccgatacaggtactcgcgctccgcctccgtggcacccttcgtatgtgcctcaaagtcttcttccgtgtactgaaccgcaaagtgcgtattgacgttcagcgtcacgttgctccagacgtgctgtagttcctccttggagccgatcaacgtggatcgatgctgctccaaaatcaaccgccgccggtggtcgaacaagaacgtggggctgtacacatagaggcacatgaaaaacgtgtaaaaattgtagacgatctgtatgagtttctcgcgaatctcgctgacaaagagcgagctcttctgactggccggctggatcagcgccatttgcgcgtaggctgcgcaggtatcgtgattgaaacccagttccactagtcgcgttaccatctgcgtcagatccagtagccgctgcacgcgtcgcggcgtatgcaagtggtcttccagcacgcgatcgcacacgcgcgcgtaagcgtctaggttagcgcgcggcgaaacttcctcgctcaacagacgcgagatcagacccgggtggaaaaacatacgttcgggcgacaggtaaaggtttacggtggagatacgcgtgctaatgatgggaaacatgaggccgctggcgtcacgcgcctgcagattacccacgaacagcttgtagctgacgtcacgcatgtgttcagcaccgggcttctggtcgccgtcaatatcggaactgacgaaagagctcatgtgccgcacgctgttcttgacgtagttttgaaactccacggccaaatcgccgttaaccgaacggtagtgtgtgtaaaaaaaatgcatcagaagcaccgtgtccagttcggtgtcggtgtcacgccgaaacaacacgtagggcatgagcgtgcaggcccagtagatgagccgctggtaggtcaggtccaggagttcggccacggcgcgacaattgacgtagggccgcgcctccgtggcagccgtttccagctgcgtgatcacccggcggaccagcggctgctggcccccggaactcgaaccgcccttcttgccgcggcgctcggtcgacgcgttgttactggcgatcaagtccgccgccgccgcggtgccgccgctctgttcggttattacggtctggatctcgcgcagggtctgcaacagcttctggaaagccgtcagcgtggccccgttgtggtagaacggcaaccggtcctcgtctccgccgccgtcgtgctggtgtcgcaggaagcggtccagctgttcgtgcaactgctcggcggcatacagcgggtcgcgcgccgtctgtaccgtggcgtggcttaggaggtaaaagaccacgttctgacgcacgaagccaaagtggtagcccgagctcggcaacgcacccacgaaggcgcgcacggcgctcgcggtcacgtcctgggcatccaccgcgccgatctccaattggctcacggtatttaacgcctccgctttgtccgtggcccgtgcccgcagctgctctatcaactttttgaaatctaccgtgcgcctcgccatcatggacgcgcgcgcggtggccaaacggccgcgcgacccggccgacgaggacaatgaactagtgacggcgctcaaagccaaacgcgaggtaaatactatatcggtgcgctacctctaccacgccgatcaccaggcgctcacggcgcgtttcttcgtgcccgagggcctggtagagttcgaggcgcagccgggcgcgctgctcattcgcatggagacgggttgcgactcgccgcgacacctctacatcagcctctacctgttaggcattcgcgcctccaacatctcggctagcacgcgctgcctgctcgaaagcgtgtacacggcctcggccgcgcgcgccgcgctgcagtggctggacctgggcccgcatctgctgcaccgccgcctcgagacgctgggctgcgtcaagaccgtctcgctgggcatcacctcgttgctcacttgcgtcatgcgcggctacctttacaacacgctcaaaacggaggtgttcgcgttgatgataccgaaagacatgtacctaacgtgggaagagacccggggacgactgcaatacgtgtatttaatcatcgtctatgactatgacgggcccgaaacacgtcccggcatctacgtgctcacctccagcatcgcacactggcagaccctggtcgacgttgcacgcggaaagttcgcccgcgagcgctgtagctttgtcaaccgtcgcatcacgcgcccgcgccagatccctctgtgtaccggggtcatacaaaagctgggctggtgcctggctgacgacattcacacctcgttcctggtacacaaagaactcaaactgtccgtcgtccgcttggacaactttagcgtcgaattgggagactttcgagaattcgtctgagcggcgctgacagcatacggggaggagacacagaagaaaaaaataaacacatcgcacacagactttataaaccgtagttatcggcgccatctagactcactttattgaaatctacctgatttctttgttcttttcctcgtaaacttatgaatccggctgacgcggacgaggaacagcgggtgtcctcggtgcccgcacatcggtgccggccaggtaggattccaagccgcggcgcggaaaccgagacggaggaatcgtcggcagaggccgccgctgatactaccgggggagatgacagcgagctcgaggaggggccgctgcccgggggtgacaaggaagcgtccgctggaaataccaacgtatcgagcggcgtagcgtgtgtagcgggttttacgagtggtggcggcgtcgtcagttggcgtcccgagtcgccgtctcccgacggcacgccgtctgtgctgtcgttgacgcgtgacggcggtcccgccgtgcccagtcgcggtggacgcgtgagtagcggtctgagcaccttcaatccggccggcgcgaccaggatggagctggacagtgtcgaggaggaggacgatttcggggcttcgctctgcaaagtgtcgccgccgatacaggctacgcgcatgttgatgggcaaaaagtgtcattgtcacggctattggggcaagtttcgcttttgcggcgtacaggagccggcgcgggagctgccgtccgacaggaacgcgctgtggcgcgagatggacaccgtgtcgcggcacagtgccggtttgggcagtttcaggctgtttcagcttatcatgcgccacggtccctgtctgattcgtcactcgccgcgttgcgatctgctgttgggtcgcttttatttcaaagccaactgggcgcgcgaaagccgcacgccactgtgttacgcttcggagctgtgcgatgagtcggtgcgccgttttgtgctgcgtcacatggaggatctacccaagctggccgaggagacggcgcgttttgtggaattggccggttgctggggtttgtacgcggccattttgtgtttggataaggtgtgtcgccaactgcacggacaggacgagagtccgggcggcgtgtttttgcgcatcgccgtggcgttgacggcggctatcgagaacagtaggcactcgcgcatctatcgtttccatctggatgcgcgtttcgagggcgaggtgttggaatcggtgttgaagcgctgtcgcgatgggcagctgtcgctgtccaccttcaccatgtctaccgtgggtttcgatcgcgtgccgcagtacgactttctgatctcggccgaccctttttcgcgtgacgccagttgggcggctatgtgcaaatggatgagcaccttgagttgcggcgtttctgtgtcggtgaacgtaacgcgacttaacgccgatgtgaacagcgtgattcgttgcctggggggatactgcgatttgatacgcgagaaagaggtgcatcgacccgtggtacgtgtgtttgtggacatgtgggacgtggccgctatccgcgtgatcaactttattctcaaagaaagcacgtcggagttgacgggggtttgctacgctttcaacgtgcctagcgtgttaatgaagcgctaccgtgcgcgtgagcagcgctactcgctgttcgggcggcctgtctcccggcggctctcggacctgggtcaggagtcggctttcgagaaagagtattcgcgctgcgagcaatcgtgccccaaggtggtcgtgaacacggacgattttctgaaaaagatgttgctgtgcgcgctcaagggccgtgcctcggtggtctttgtccatcacgtagtcaagtactcgattatggccgacagcgtgtgcctgccgccgtgcctgagtcccgatatggcgtcgtgccactttggcgagtgtgacatgccggtgcagcggctgacggtgaacgtggctcgctgcgtgtttgcgcgtagcgacgagcagaagctgcatctacccgacgtggttttggggaacacgcgacgttactttgatttgagcgtgctgcgcgagttggtgaccgaggcggtggtttggggtaacgcgcgcctggacgcgctaatgtcggcgtccgaatggtgggtagagagcgcgctggaaaaactgcgtccgctgcacatcggcgtggctggcttgcacacggcgctcatgcggttagggttcacgtactttgcctcttgggacttgatcgagcgcatctttgagcacatgtactttgccgcggtgcgcgctagcgtcgatttgtgcaagtcgggtttgccgcgctgcgagtggttcgaacgcaccatctatcaagagggcaaattcattttcgaattgtatcggttgccgcggctctctatcgccagcgcgcgctgggaagcgctgcgcgccgacatgctcgagttcggattgcgcaactgtcagtttctggcggtgggtcccgacgacgaggtggcgcatctgtggggcgtgacgccgtcagtatgggcttcgcgcggcaccgtgttcgaggaggagacggtgtggtcattgtgcccgcccaaccgtgagtgttacttccccaccgtggtgcggaggccgctgcgcgtgcccgtggtgaattacgcgtggttggagcagcaccaggaggagggcaaggcgacgcagtgtctgttccaggcggcgccggcgatccaaaacgacgtggaaatggcggccgtgaacctgagcgtgtttgtggaccagtgcgtggccttggttttctactatgactctgggatgacgcccgacgtgcttctggccaggatgctcaagtggtaccactggcgctttaaggtcggagtatataagtactgtgcctcttagtcgggggcccgctggctcggcgcggctgtattattagacgccgggcgtcttcgcagcgttcccggtcgtcgtgtgtgctctctataaaactttcgctcgctcgcgcccgctccttagtcgagacttgcacgctgtccgggatggatcgcaagacgcgcctctcggagccgccgacgctggcgctgcggctgaagccgtacaagacggctatccagcagctgcgatctgtgatccgtgcgctcaaggagaacaccacggttaccttcttgcccacgccgtcgcttatcttgcaaacggtacgcagtcactgcgtgtcaaaaatcacttttaacagctcatgcctctacatcactgacaagtcgtttcagcccaagaccattaacaattccacgccgctgctcggtaatttcatgtacctgacttccagcaaggacctgaccaagttctacgtgcaggacatctcggacctttcggccaagatctccatgtgcgcgcccgatttcaatatggagttcagctcggcctgcgtgcacggccaagacattgtgcgcgaaagcgagaattcggccgtgcacgtggatttagatttcggcgtggtggccgacctgcttaagtggatcgggccgcatacccgcgtcaagcgtaacgttaaaaaagcgccctgccctacgggcaccgtgcagattctggtgcacgccggtccgccggccatcaagttcatcctgacaaacggcagcgagctggaattcacggctaataaccgcgtcagttttcacggcgtgaaaaacatgcgtatcaacgtgcagctgaagaacttctaccagacgctgctcaattgcgccgtcaccaaactgccgtgcacgttgcgtatagttacggagcacgacacgctgttgtacgtggccagtcgcaacggtctgttcgccgtggagaattttctcaccgaggaacctttccagcgtggcgatcccttcgataaaaattacgtcgggaacagcggcaagtcgcgtggcggcggcggtggtggcggcagcctctcttcgctggccaatgccggcggtctgcacgacgacggcccgggtctggataacgatctcatgaacgagcccatgggtctcggcggtctgggaggaggtggcggcggtggcggcaagaagcacgaccgcggtggtggcggtggttccggtacgcggaaaatgagcagcggtggcggcggcggtgatcacgaccacggtctttcctccaaggaaaaatacgagcagcacaagatcaccagctacctgacgtccaaaggtggatcgggcggcggcggaggaggaggaggcggcggtttggatcgcaactccggcaattacttcaacgacgcgaaagaggagagcgacagcgaggattctgtaacgttcgagttcgtccctaacaccaagaagcaaaagtgcgggtagagcgtgggccgcgtgcctgggaacgcgcgcacggcgcggtcccgtgatggagaaaacgccggcggagacgacggcgatttcagctggcaacgtgccacgtgactcaattccgtgtataactaacgtgtccgcggacacccgcggccgtacccgtcccagcagaccagccaccgtccctcagcgacgtcccgcgcggatcggacactttaggcggcgcagcgccagccttagctttcttgactggccggacggcagcgtcacagagggcgttcggacgacctccgcgtcggtcgccgcctccgcggcccgtttcgacgaaatccggcggcgccgccagagcatcaacgacgagatgaaggaacgcacgctggaggacgcgctggctgtcgagctggtcaacgagaccttccgctgctctgtcacctccgacgcccgcaaggacctgcagaagctggttcgtcgcgtcagcggcacggtgctgcgtctcagctggccaaacggttggttcttcacctactgcgacctgttacgcgtcggctactttggacatctcaatattaaaggtttggagaagaccttcctgtgctgcgacaagttcctgctgccggtgggcactgtgagtcgttgcgaagccatcggccgcccaccgctacccgtactcatcggcgagggcggccgcgtctacgtctactcgcccgtggtggaatcgctgtacctggtgtcgcggtccggtttccgcggcttcgtgcaggagggcctgcgcaactacgcgccgctgcgcgaagaactgggctatgtccgcttcgagaccggcggcgacgtgggtcgcgagttcatgttggcgcgcgacctgctggccctgtggcgcctgtgcatgaagcgcgagggttccatcttcagttggcgagacggtaatgaggcgctgacgacggtcgtcttgaacgggagccagacttacgaggatccggcccacggcaactggttaaaagagacgtgctcgctgaacgtgctgcaggtatttgtggtgcgggccgtgccggtggagtcgcagcagcgcctggacatctccatactggtgaacgagagcggcgccgtcttcggcgtgcatcccgagacgcggcaggcgcactttctggcgcgcggactcctgggcttctttcgcgtcgggttcttgcggttctgcaacaactactgcttcgcccgcgactgttttacccaccctgaaagcgtggcacccgcttaccgcgccaccggctgtcccagagaactgttttgccgtcgtttgcgcaaaaagaaggggctctttgctcgaaggtgagccgcggacgccgtcggtaccgtctccaccacagttaccaccgtcgccgtcactgccaccgacatggagcccacgccgatgctccgcgaccgggatcacgacgacgcgccccccacctacgagcaggccatgggtctgtgcccgacgacggtttccacaccaccgccgccaccacccgactgcagcccaccgccctatcgacccccgtactgcctggttagttcgccgtcgccgcgacacacgttcgacatggatatgatggaaatgcccgccaccatgcatcccaccacgggggcgtactttgacaacggctggaaatggacttttgctctcttagtggtcgctatattagggatcattttcttggccgtggtgttcaccgtggtgattaaccgggacaattccactacaacgggtacatcatcggggtaacgggaaatagagcatgtgcttgactgtaccatcattgctgctacggaataataactacgctacgacctggcctgtggtgtgtgttgttttttgtgcacgcacgacatgacactcttttgccgtaccgccaacagcaccgccggctacgtcgacatgaacgtctgcatcggcatgatcggcgtggtttgtttcgttttcggggtctttattctcatcttttgctccacgttgaaagctttctacgtgcggcaaaagacttaccacctcctgggtaccgagtcggacgacgaggagaccacggtttgggaaaagcgccggatggagtcggatacagacttttaaaagaagccataaaaatatgggaattcccctgcctacgtcttcatgacgggcgcctttttcttcgcctcgggctctgtctcgtcgtcattcgggccaggactttttaatggccaacagcctgtggcaccgcctccgaacgttcgtgagcaacagtcggcagaatgaacaaattcagcaacactcgtatcggcttcacttgcgcggttatgactccgcggactttaattctgacggttggactcctgtgtatgaggatcaggagtttattgtgttctcctgccgagacgacggtaacaaccgccgccgtgacgtccgctcacggtccgttatgtccgctcgtgttccagggttgggcgtacgccgtgtaccaccaaggcgacatggccctcatgacgctcgacgtgtactgttgccgccagacctccaacaacaccgccgtcgcgttctcgcgtcatcttgccgttaacacgctgttgattgaagtgggtaacaacacacatcgccgcgcagatggagtctcctgcctggaccattttcgcgcgcaacaccaggattgcccggcccagacggtgcacgtgcgcggcgtaaacgaaagcgcttttgggctcacccacctgcagtcctgttgcctgaacgagcattcacaactctcggagcgggtggcctatcatctgaagctgcggcccgccacgttcggtctggagacctgggccatgtacactgtgggcattctggccctgggctcgttctcctccttctattcccagatcgctaggagcctgggggttctgcccaacgatcatcactacgccttgaagaaggcttgataatgataactgcacatcctcacgagtgcccttacctatcatcacactaagaataaagaaaatcgatcagtgtcgtgacgtgtggtgtgtgtttttcactgttattgggtaccagggaggaggggttaagaggtcacaggtgcgatttaccgtaaggagagtcacacttaagaaaaaggtggaaatccctcacccgttttattcccgtcagccgtcagtgacgtgaatcgcccctcacgtcagtgttgtcccctatccgcgtgagctgggtggctcaccgtcaggtgctccgagacgcgcgtactcggaaagtgcgtcaatgcggtcggtcagccgaccctttgatgtagtacatcgcgtgcgaagatgaaaaacatcttaagaaaccgggtcgcctaaggggaaaaccccacgtgtcttgggcgcgtcatgtccggcgtcttcatgtatataagacggtgtttcaagacgacgtgagacccacacgcgggtttcacttctttctttaattatgtctccagtctacgtgaatctgttaggtagcgtgggcctgctggccttttggtactttagctaccgctggatccagcgaaaacgccttgaagatcctctcccgccttggttaagaaagaaaaaagcatgtgcgctcacccggcgttctcggcaccggttacgccgccaacatggcgtaattgacggtgagaactcggagaccgagcggtccgtggacttggtggccgcgctcttggccgaggccggggaggagagcgtaacggaggacacagagcgggaggacacggaggaggaaagggaggatgaagaagaagaaaacgaggctcggacgcccgaggtgaaccccatcgacgccgagggcctctcaggacttgcgcgagaagcctgcgaggccctcaaaaaggccctgcggaggcaccggttcctgtggcaacggcggcaacgagctcggatgctgcagcacaacggcccccagcagtttcaccagtaagcaggggtaaacaaaaaaaccacagactccgggatagtataagaagggactttaccgctattgctgctattcatagagaaggatagaaaggatgactacgaccacgcatagcactgccgctatcatgagcctgctggacgaggccgagtggcgacagacgcagatggacgtggggggactgatccaggcgtcggcgttgggcaaggtggcgcttcgctacgcggtgaggaaactgatgaagcgcggagccaggctgcggcacgactcgggtctctacgtgtgcatctgcgacccttcgtacgagtttctgcagatgaacctgagcaagatcagttggctggagcgacactgccccccgttggaccaggagctcatcatgttcggggtcatcgaggcctgggaggaagcttcggtgcggcccacgcgtcagctggtgttgttcatgacacccaagtgggacgtgttcgcctacgactccggtatcctgtttttcctggcgcccagcatggcgcagttctggcacggtgccatcgtgctggagtattggaacgctttgttcccggtggaggtgcgttcccacgtccgtcagcacgcgcacactatggacgacctggtgatggtcttccaccagctggactacgaaaagcaagtgctggaagcgcgtcgcgacaagaatacggaggggccgcgcacttttgccaagtcggtgaacagctacgtgcgcgccatcctggaatctgagcggcggatccgcgaagggaaaattcctatgaccttcgtggatcgcgactcgctgcgagccaattcgttggcccacatccaagccaccggggctcagccttctcacgccccggcgcaacgggtgctgtccgcgccgccgagcctgccgtcgcccgtgtcggaagaagaccccgctgccgccgccacccctccgtcctccgccgccaccacccccccgtcctctgtcgtcccggcctccgtcgagagcgagttgtccttgtcgccgccgctgccgccggtcgtggtgaaggatgtgatgtacacggccggggagggcgacgtggtacagatggtggtcgtggtctagaaggagaactttgctgctagatgaccatgttcagcttttttttttttgtagtattttttcatagttgctatacctcagttatcccccctattagccccacatgctgcttaataaacatacttgtttcattttctttctagtgccgcggttttttgtcgcgtccacgggctgcgcgggtttcaggtaaaaaacgtgtgtgataaacgtgggtttttacctacgggaaaggggagggtagaaacgtgagtctccgtcaataaaaagtcccgtgtcgtctccacgtaggtttctgtgtggctgttgttgacgctgctttggagcacgggacacggtgtttcggtccgatgtacgtaccacggtacggacgttaatcgcacttccaacaccacgagcatgaactgccacctaaactgcacacgcaatcacacgcaaatctacaacggcccctgtctcgggaccgaagccagactgcccttgaatgtaacgtttaatcaatcacgacggaaatggcacagcgtcatgcttaaatttggttttcagtatcacctggaaggctggtttcccctgcgtgtcttgaacgagagtcgtgagataaacgtcacggaagttcacggagaagtagcatgttttaggaatgacacgaacgtgaccgtgggacaactgacgctcaacttcaccggccacagctacgtgttgcgggcaatagcgcacacgagtccgttcgaatcatacgtacgttgggaagaaacaaacgtcactgacaacactacttcttcagaaaacactaccaccgtgatgtcaacactgacgaaatacgcggaaagtgattatatctttctacaagacatgtgcccgcgatttctcaagaggaccgttaagctcacgagaaacaaaacaaaacataacgtgacagttacgggaaataacatgacaacgcttcccgtctggacaccggaatgcaaaggatggacgtactggaccacgttgtccgtcatgtggagaaaccgccgttcggctctcctccgagccaaaagtcgcgccttgggacactgggcgttgttgagcatatgtactgtggcggcgggcagcatcgcgttgctcagcctcttttgcatcctcctcatcggacttcgtcgcgatttgcttgaagatttccgctacatttgtcgggacgagggaagttccagcacaaaaaacgacgttcatcggatcgtctgacgtcaacgctgatagtgtctataaaggccgtgccgccgcgccgtagttctccgaaggcggacggaggagtctgtcgaccgcagcggtggctggagaagcgcagcgtcggcgagcgaaggtagaggagtccgtcatggacgacctacgggacacgctgatggcctacggctgcatcgccatccgagccggggactttaacggtctcaacgactttctggagcaggaatgcggcacccggctgcacgtggcctggcctgaacgctgcttcatccagctccgttcgcgcagcgccctggggcctttcgtgggcaagatgggcaccgtctgttcgcaaggtaagccccacgtcgttgaagacacctggaaagaggacgttcgctcgggcacgttctttccaggtgttttcaacgtgcgtggattttttctctctaccaggtgcttacgtctgctgtcaggagtacctgcacccctttggcttcgtcgagggtccgggctttatgcgctaccaactcatcgtgctcatcgggcagcgcggcggcatctactgctacgatgacctgcgcgactgcgtctacgagctggcggccaccatgaaggactttctgcggcatggctttcgtcactgcgaccacttccacactatgcgcgactaccagcggcccatggtgcagtacgacgactactggaacgccgtcatgctctaccgcggtgacgtggagagcctgtcggccgaggtgaccaagcggggctacgcttcctacagcatcgacgaccctttcgatgagtgtcccgacacccatttcgccttctggacctacaacacagaggttatgaagttcaaggagacatccttcagcgtcgtccgcgcgggcggcagcatccagaccatggagctcatgatccgtaccgtgccgcgcatcacctgttaccaccagctgttaggcgcgctgggccacgaggtgccagaacgcaaagagttcctcgtacgccagtacgtcttggtggacactttcggcgtcgtctacggctacgaccccgccatggacgccgtctaccgtctggccgaggacgtggttatgtttacctgcgtcatgggaaagaagggacaccgaaaccaccgtttcagcggccggcgtgaggccatcgtgcgtctggaaaagacacccacctgtcaacatcccaaaaaaacccctgaccccatgatcatgtttgacgaggatgacgacgacgagctgtcgctgcctcgaaacgtgatgacgcacgaggaagccgagagtcgcctgtacgacgccatcaccgagaacctgatgcactgcgtcaaactggtgacgacggactcgcccctggccacgcacctgtggccgcaggagcttcaggccctgtgtgacagcccagcactgtcgctgtgcaccgatgacgtagagggtgttcgccagaagctgcgagctcggacgggctcgttgcaccactttgaactctcctaccgctttcacgacgaggaccccgagacctacatgggcttcctctgggatatcccgtcctgcgaccgctgcgtgcgccgacggcgtttcaaggtgtgcgacgtcggtcgacggcacattattcccggcgccgctaacggcatgccgcccctcaccccgccacacgcctacatgaacaactgattaaggaggggacgacgagcacggtggtcctgtttgtctatgtgcatgtttttgtatataacacagcattttatataacctttccctgtcttttttactcgtaaactgtgtactccgctggtcaataaagaaaaccacgctgttagaaaaccacgtcgacggtatttttattgatatcgacgtctcgtcctgagacagacacgtagaaaaagaggaaaaaccgcgttcagagatgccgtaggttttcggccagatcgtcccgcgggtcttcgacgtcgctgccgtagctagtgctcggcatgctgtcgggtccctggaagcgtgtgtgggccggccctcggggtgcgggtggcgggctgcgtcgccttcggtgacgtcggtggtggctgtaggctaccgagtagggcgaaaagagggtcacgctgaccatgcggcgtcgttgccggggcggctgctccaggtccgcggagctaatgccgtgcgaccccgacaaagaagaagaggagagtaagagacccgtggtagaagaagtcccggccgaggtgtacgtggacgcgggcgtggtggttcgtgtggatgacgacctggcggacggcagcgaaacagaattcggagatgctgaggacgacgacgaagacgcggacgacgaagaagctgcgtcggtcacaggacggcgaaaaacatcggcaaataaatcgcgatgttctgtgatctcgggttccgactcctggcccagaggcgctctatcgaggagttccatgaagcgcttgggtgtcaggcccgtctgccgagaggcgccctcgatcatcatgctatagatgcgctggaggtgatacgtctcggtggtgatcttgccttcgtggaagttatagaagatctgcagggtttcgggccgttccacgaacatacgtcgacgcaggtagcggctgggttgctcgggcacgcggaaaacctcgccgttgccgtacaggttcttggagaagaaaaagagctcgccctcgcgcgccgtgggatcggcttcgagatcgagctgggcctcgcgcggctcgccgtcgttctcctgctcttcgtcctcgtccccgaactcgccgcgctcgcgggcgtccgagaccgattggatctttttcagcagcttgtacgcgctgaaatgtaaatatcccgggcagaggtacacgttggcctcgtgcagctgcgtcagtagttgcaacagattgtacagcatcggctggaaggccggactgctgtgttgccgcgcaagttccagcccacgcaccagcgtgacgaaagtctgccgtgtttcgggggcttgcgtgtaacaaaagtaaagcgcgtcgcaaagacggttgcagcgttccaccacccagtcctgcatcatttgtagctccagcgcgtgtcgcagctgtaagtgtcgcagcgtcaacaacagatacatgtcgtttagcgcgtcctccagggtgcgtgagcccgggcgtttgatggaggtgaggcagcgcaacggtcggttacgacgttgtgttacgtcggacaggttctcggcgcacagatccaccgcctcgaccgtggtgaagggcggtgggtggaacagcaggttataggtggtgaggcgcggatagcgcgcctcggcctcgggagacgcgcgcagccccagcgcgtcgcgtacccggtgcaaccggaccagcgctcgttttagcacgccgaatgtcacatcgtcggcgcccaggtgcacgctgatgtcctcgggcttgacgccggtttgcgcagcgcggcagagtcggatgagccctctaagcagccgcgtcttaagcggctccgagtacagcacgtcgagctgcgtgcgcaggtcccgcaacacatcgcggctgttgcggtagtgattagcgagaatgcagatacggataatctcctgggccacgggctttaccttcataaaagcgttgcgcacctggaagtccaccagggcctccagcgcgtatacagggctgggcacgccaaagttgagcagccccacaaagttggagcagccctgggtcaacatctcgagcagcaggcgccggtgctcgtctccaaacaggtcaacccgaaagttgagccagtcgtccacggggagaacgggcagtggcgggcccgatggggctcgcgatccctgggccatgatggggccccctttgaaaacgaaaccaaaaccagagcggaacttgagaaatcaacgctttattgttctccagtgacgttaaatacacaacggggttatgggggacgtgacgggggtaagggctgaggtgactgaaggtgagggggtcgcggcgactcgcacagaggtctggctggctagaggtccgtcttcttcgtcggcgcgatgccgcagggcggtcgctagcgtgtcgcagcgttcgccaccgttgccgtcgttgttggagacggagggttctgcccgcaggaatgctgcggttgccttgcaggagggaaacagctcctcttcttcctcctcgttttcttcgggcttttgctcgtgaggcggcacgcgtgtgcggggacgacgggcgttgcggggcttcttggaatcgtgaagcggcgccgggtcgctgtgacggagctcgtcgtcgtcctcctctccctcgtcgttgttctcatcggcctcgggcggcccggccgccgcgctgtgtgagagttccagggccgccgacaccgagtccgtatgaccgatctggaagagcatgcggtaggcctcgctgtggtaacagccgtcgaagacttgtgcgatatccaaacctgagttcatcaacaggtgtaggaagctgttctgcaggtagtggcgcaggtgtccgatgagacggatggagcgcgcccacatgtgcggcgtctggtgcaacaagccgatgaggacgtggcacagttcgcggtggcgctcgtgtggcagcaaggctaccagttgatgcacctctacgcccagcgccgatttttcgccgcagcgtttggtcaactcgtcgcgcgcgtagctcaccaccttgtcctggtgctcgcagtagtggcgcagctgggccgtgaaaaccagctggttgaagagcgcgcacacgcgcgacacagccgtctgcagttcgtcggccggcgtgggcggctcgcggagactgggctgcaggcggcagcggatactggccgtgacttgctggatctcgtgggggtccagttcggccggcgcgcgcttgagctgtgcgatgccctggtggaacttgcggtagtcgcgctcggtgcagaaaacgaagaggttgctgttgcggcgcgagcagccgccgggcggcacgggcaagtgcttcagcagcagcttcttcttgccttcggcgcgtaccgtgcccttgtacgctttggaaatcgagcctgccacgttgtcacgcatctcggcggctcgcaggactgaatcgtcgttggagaagtctcgggtggtgatgatgaagttcatgacgacgacggcggtggggcggtaatagtataggtccgtgcgagcaggccgccgccgtgggggccgcggagggaggagagggacgggaacgatcaccgctcggagaaaacaacgtcgacgggggacgtcgtttttatcgtaccgtgccgagacagaagttgcgccggacggcgttgtggcgcgcaggggctccgacgtggcgttataatgaagccggggcgccactcctacgccacgcgattggccgtcggcgtccgcagtcgggcgaaatctgtgtaccgtgatgacagatcagggggacgtgtaccgtatatgaggggaaatggcgacgggttctggtgctttctgaataaagtaacaggaaagctcataccccgctgaggttatgatgcgattgtgagagtcgatgggggatttttgtggatgtgtcgttggacgcggttttctggccgcctttccacgtaccgctgggaaaattgaaagacacgctgcgtttggcgtgctgattgcagtttttgctattggggtctaatgacgtagccactgattgtgaattgttgccagccgctagatttgtctccgctgtagctcgctgattctgctgcgatctcaggaaagcgcggcggtccagcaactgaccgcggaaacactgccgcatgcgttgcagaaagtcatgacccagcagcgcgtacaggatgggattaatgaggcagtgtaggtggggcaccacacgcgccagcgtgccaatggtgcgtcgcagtgtgaggtgttcacactgcatgggccaggcggttgtggcataactgttgaagatcatgagagagacgtagggagtctgtagcgccacgaaggagatgagtagcacgctaacaaaggttaaggtacgactcctttgtttctgtgacgtgcgctgtacggttgagtaaaagaatgcgtagaaccacgtcatcattatcacgggtgcggcaccccataccagcgtcagcagcactttccacgaaagcagcactgtgtgcacttcttcagctacgaagtacagtacacaggtggcgtgcccattagtattattggtatcgttggcatcgtgatgcatcaccaccgtggtgtaaacagctgcgggcacggaaaaaattagtccagcgagccatgtcaatagcaaaatcatataggttgaacggtatgattggcgtgcgtatgttcgtttatgaaggacgcgataacgatcggcggcgatcagagctacggtggcaaagcccactgtgcagcttgagtagtagatcaccgatagaaatttacacgaggccacgccggccggcaacagccactggttgctgagtacgataaagggtagcacagtaagcgtgagaaaattagtagagtagaggttggtcatgtaaatggtgggcgtcgaatagccaagcacgcggttcgtgagcagctgcgtgatcaacactatggcgttaagtggaccgcccacgaagatgatgaatgtgttgagtacggcttcggtggttcgaatggcgaatagcggccctgtcatgttgcaagtgtcattgatgtgcggaggagtgttgttgcgggtctgggcggaacagcacacggggcgaaaaaacagaagaaacaagtcagcggcgcttaaaagaaaaccgcgtatccgcctccgctattaaactaccccccctccctctaggtggggcgctcaccgagttgtggatgatggtgtccatcgtgggcgaatagcagaccgcgggcgcagtccggggcgacgacgcttccgggttctggagaaaagccagcatgagtttgcagtttatcggtctacagcggcgcgatgtggtggccctggtcaactttctgcgccatctcacgcaaaagcccgacgtggatctcgaggcacaccccaagatcctgaaaaaatgtggcgaaaaacgcctgcaccggcgtacggtgctgttcaacgagctcatgctttggttgggatactaccgcgagctgcgtttccacaaccccgacctttcctcggtgctcgaggagttcgaggtgcgttgcgcggccgtggcgcgtcgcggctacacttacccgttcggtgatcgtggtaaggcgcgtgaccacctggctgtgctagaccgtaccgaattcgatacggacgtgcgccacgatgctgagattgtggagcgcgcgctcgtaagcgcggtcattctggccaagatgtcggtgcgcgagacgctggtcacagccattggccagacggaacccatcgcctttgtgcacctcaaggatacggaggtgcagcgcattgaagaaaacctggagggtgtgcgccgtaacatgttctgtgtgaaaccgctcgaccttaacctggaccggcacgccaacacggcgctggtcaacgccgtcaacaagctcgtgtacacgggccgtctcatcatgaacgtgcgaaggtcttgggaggagctggagcgcaaatgtctggcgcgcattcaagagcgctgcaagctgctggtcaaggagctgcgcatgtgcctttcctttgattccaactactgtcgcaatatcctcaagcacgccgtggaaaacggcgactcggccgacacgctgctggagctgctcatcgaggactttgacatctacgtggacagcttcccgcagtcggcgcacacctttttgggcgcgcgctcgccgtcgttggagtttgatgatgacgccaatctcctctcgctcggcggcggttcagccttctcgtcggtacccaagaaacatgtccccacgcagccgctggacggctggagctggatcgccagtccctggaagggacacaaaccgttccgcttcgaggcccatggttctctggcaccggccgccgaagcccacgctgcccgttcggcggccgtcggctattacgacgaagaggaaaagcgtcgcgagcggcagaaacgggtggacgacgaggtggtgcagcgtgagaaacagcagctgaaggcttgggaggagaggcagcagaacctgcagcaacgtcagcagcaaccgccgcccccgacacgtaaaccgggcgcctcccggaggctctttggctccagtgccgatgaggacgacgacgacgatgatgatgacgagaaaaacatctttacgcccatcaagaaaccgggaactagcggcaagggcgccgctagtggtggcggtgtttccagcattttcagcggcctgttatcctcgggcagtcagaaaccgaccagcggtcccttgaacatcccgcagcaacaacagcgtcacgcggctttcagtctcgtttccccgcaggtgaccaaggccagcccgggaagggtccgtcgggacagcgcgtgggacgtgaggccgctcacggagaccagaggggatcttttctcgggcgacgaggattccgacagctcggatggctatccccccaaccgtcaagatccgcgtttcaccgacacgctggtggacatcacggataccgagacgagcgccaaaccgcccgtcaccaccgcgtacaagttcgagcaaccgacgttgacgttcggcgccggagttaacgttcctgctggcgccggcgctgccatcctcacgccgacgcctgtcaatccttccacggcccccgctccggccccgacacctaccttcgcgggtacccaaaccccggtcaacggtaactcgccctgggctccgacggcgccgttgcccggggatatgaaccccgccaactggccgcgcgaacgcgcgtgggccctcaagaatcctcacctggcttacaatcccttcaggatgcctacgacttccacggcttctcaaaacaccgtgtccaccacccctcggaggccgtcgactccacgcgccgcggtgacacaaacagcgtctcgggacgccgctgatgaggtttgggctttaagggaccaaactgcagagtcaccggtcgaagacagcgaggaggaagacgacgactcctcggacaccggctccgtcgtcagcctgggacacacaacaccgtcgtccgattacaacaacgacgtcatttcgcctcccagtcagacgcccgagcagtcgacgccgtccagaatacgtaaagctaagttatcgtctccaatgacgacgacatccacgagccagaaaccggtgctgggcaagcgagtcgcgacgccgcacgcgtccgcccgagcgcagacggtgacgtcgacgccggttcagggaaggctagagaaacaggtgtcgggcacgccgtcgacggtacccgccacgctgttgcaacctcaaccggcttcgtctaaaacgacgtcatcaaggaacgtgacttctggcgcgggaacctcttccgcttcttcggctcgacagccgtcagcctcggcgtccgttttgtcgcccacggaggatgatgtcgtgtcccctgccacatcgccgctgtccatgctttcgtcagcctctccgtccccggccaagagtgcccccccgtctccggtgaaaggccggggcagccgcgtcggtgttccttccttgaaacctactttgggcggcaaggcggtggtaggtcgaccgccctcggtccccgtgagcggtagcgcgccgggtcgcctgtccggcagcagccgggccgcctcgaccacgccgacgtatcccgcggtaaccaccgtttacccaccgtcgtctacggccaaaagcagcgtatcgaatgcgccacctgtggcctccccctccatcctgaaaccgggggcgagcgcggctttgcaatcacgccgctcgacggggaccgccgccgtaggttcccccgtcaagagcacgacgggcatgaaaacggtggctttcgacctatcgtcgccccagaagagcggtacggggccgcaaccgggttctgccggcatggggggcgccaaaacgccgtcggacgccgtgcagaacatccttcaaaagatcgagaagattaagaacacggaggaatagttaagaaacacacacgcagacgtactttttaatgaaatcatcggatagtgacgtgtcgggaaaggaggacggacggagggtcagggatggggagatgtgagaaagttgtccgcgggcaattgcatgtcgcccagaaagaacgtggttgctccggcggcgtgcatctgccgaaacaccgtgtggtgattgtacgagtacacgttaccgtcgccctcggtgatttgatacaacgtggcgatgggggtgccctgcgggatcacgatggaacgcgtgcgcgtccacagcgtgactttgagcggctcgccgccgcgccacacgctgagccccgtgtaaaaggcgtcctcgtgtggcaagttggccaccaagaaacaccggtctgtgatctgcacgtagcgcaagtccaactccaccgtctgccgcggttgcactccgaagtggatatcgtaaggcgcgtgcaccgtgagcgaaaacacgttgggctcgttgagaagcggacagttgagcgcgtcgccgctaaaaaagagtgacgggttgcggctaaatcgcaggtcgtacccgcgctgcgcgctcgtcagcaggtagaaggaaaaggcgcgcggcatgttgcgcgccgtgatcttgtccgagacgcggtgacagaaggaggtggccacggtgcccagcagttggcgctgttccgcgtccacgcatagtgaatccacgttgacggtgaaaatgagacccatgaattcgtactgtacgtttttggacgcgatccacgcctcgtcctcgccgggtagcgccgcctcgtcgtcgtccatcgtgccgcggaactgcgcgaggtagcgcgtaatttttttgtgtccgtacgtggttacgcgtttactgatccaggtcagatggtccacgcgacacagcagcgtcgcgccatgccgcgtgacgctgacccgtccaaagggcgccgtctcctccaaccccgcaacgccgctcggagcaccgccgcagcccggctttcccggcgtcgtgaaaggcacggcgtaatgcgggcaggcgtgcggcacgaagggcaccatgaccagttgtgtgtgcagaaaaccgatctgcaccgcctgcgactgccgcatggtttcctcgtcgtaaaccgccatggacgagcagagcccgcccttggtgatgagcggttgcagcaccacggagctctcgctggtggagcagagcagaaagaagagctcggcgtacgccgccttgggcgtcaccacgttggaccagtcgtacttgtagccgcagccctgcgtgttgttgtaaatgacgggaaacgagagaaagatgcagccctgcacgtacgaagctttctccgtcacgttcgaggccgtgttgtactgctcggtgatggacaccaagtacgactcgtaggccgtcaggtgcgaggccgaacggtgaatcttggcgtggcgcacgcagcggccgtagttgtcgcggtccgcgtcgcgtagcgcttcgatccacgaggtcaccacgtcctgcgccggcagacgatagtcctgctcggggtccatgtggcggcacagccgcaggcgctctgccagttggcgagggataccgtcgtgcgaccttttgaccgcggtggtgcccgtcgtcctcgtctcccctccttcgtcctccctgttttctcttctctcattcccggtctccggacccgcagccgctacctcttgctccgcggttttctcgcccacctcgctcgtcgctgttgccgccaccgcagcggcggcgacggacggcggcggtaacagcagctccgtgaagctgacgagcggcagcggcgacgacggtggcggcgacgacacggcgacggtcaacagggtcacaagcgtgggcttgtcccccataatctggtcgccgccaccgccgtcgttgccggtccccgtttcctccggcgccgcggtttccgccgtctccggatgagcggccgcggcgcgggctcggcgtcccgccgtccgagacggtgtatataaaccgcgtcggcctcgccggcccgagcgcgccggggagaagaatctcttcccgggccctgcgttcaagacggcgtgccgtgacgctcgatgggtccgcttcatcagactgcgtacgctttggagcgtcagacccagggcgcatgtagccgacttggaggactttgccgccttttatcgcaccctctcggacagtgagcagcaggagttcgagcaagaagccgaactcgcctcccgctcacaacgcgtgcgagacctgcgcgaggcccggcgccagctcaagatggacctgatgtgtcacggcggttgaaaacgcgcatgatctcgcggagccatctacgcgcctgtcagggcgatgacgacatcggcgatgacggctcctgatacgcgccggcagctgcagcacgtggagacgctgcgtcggtttctacgcggcgacagctgctttgtgcacgatctccggggcatgatggactatcacgacgggctctcgcgccgtcaacagcgtgccttttgccgcgcgggtcgcgtgttgacggacccggagcccatccagagcgagacggagggggagaataaacagtttacggagcacacacacaaagtagtctcgttttttattaaaagtgtctttgtatttccctgtcttgtgttgcccaactgctgtcaggtctccgtagatcgctcccgggtgcccgagacggggggcagatggctataaaaacccaagtagcggcgcgccccggcgctcagtcgcggctgagcgtgtggaggacggggtggagcgggtcgccgagactactactgcttctgcttttttgtctcctgtggatcgtcgcggactgccggcatgtccggccgtcgcaagggctgctcggcggccacggcgtcttcctcctcgtcgtcgccgccgtcgcgccttcctcctctgcccgggcacgcgcgtcggccgcgtcgcaaacgctgcttggtacccgaggtcttttgcacgcgcgacttggccgatctgtgcgtgcgacgcgactatgagggcctacggcgttatttgcggcgcttcgagggctcgtgcgtatcgctgggctggccctcgcagtgcatctacgtggtcgggggcgagcattcgccgcactcgctaactgagatcgatctggagcactgccagaacgactttttcggcgaattccgagctctgcatctcattggcacggtctcgcacgccacctgccggtaccaggtgttcgtggacgcgtacggcgctgtgttcgcctacgacgcgcaagaggactgcctgtacgagttggcctcggatctggccggattttttgccaagggcatgatccgctgcgacccggtgcacgaatccatctgcgcgcgtctgcaacccaacgtgcccttggtgcatcccgatcatcgggccgagctgtgccgccgctcgcgcgcctccgctcgcggccgctacctacgttcgctgctggctttccgcgagttgctggcctgcgaggacaccgccgctcgctgcgcctacgtagaggcgcaccgcgaggcgcagctgaccctcatctggcccgagaagcattccctggtgctgcgcacggcgcgcgatctagggctctcggcctcgatgctgcgccgctttcaacgttcgttgtacacgcgcgagcccgtcatgccgctgggcgagatcgagggcgccgaggacaagaccttctttcaccgcgtgcggattctctgcggcgacacgggcaccgtgtacgcggcgctggtggggcaggataagttggtgcggctggcgcgcgacctcaggggcttcgtgcgcgtggggctagcgctgctcatcgacgactttcgctacgagagcatcggccccgtggaccgcagctcgctgtacgaggccaatcccgagctgagactgccgttcaaaaagcgtaggtgagtcatcagtgtacacgcccagaaatagggcgacggtgtttttataaccgaaagtagcgtgtttgagacacgcgcttctggtcggttttttcaccgtcgtcgctctaggtttgattttcgcgctcttgtgtctcccgacaggctcgtcgtgggctactttgactcgctctcgtcgctctatctgcgcgggcagcccaagttcagcagcatctggcgcggtctgcgtgatgcctggacccacaagcgcccgaagccgcgcgagcgtgcgagcggggttcacctgcagcgctacgtgcgcgccacggcgggtcgttggctcccgctgtgctggccgccgctgcacggcatcatgctgggcgacactcagtactttggggtggtgcgcgatcacaagacctaccggcgcttctcgtgcctacgccaggctggccgcttgtactttatcggcctcgtcagtgtgtacgaatgcgtgccggacgcaaacacggcgcccgagatctgggtctccgggcacgggcacgcctttgcgtacctgcccggcgaggacaaggtgtacgtgctggggctctcgttcggcgagttttttgagaacggcctctttgccgtgtatagcttctttgagcgcgactacgtggatgaaatcgtagagggcgcgtggtttaagcacaccttcgcgggcatgtacgaactctcccagatactgcacgaccgcgccaatctgctgcgcgtatgtcagctccacgccggtagcaagatccgcctgggcggctcgcccgcttgtactttcactttcggctcgtggaacgtggccgaggccgacgaggccaacaattttgtgatcggcgtactagaacaggcccactttgtagtcatcggatggatggaacccgtgaacaaagccgtatttatggacgcgcacggcggcattcacgtactgctgtacggtacgatgctggttaagttggccgagacgctgcgcggttttatccgtcagggttccttctggtttcgttgcccacggcgtttttgcttctcgccgttggactcgagcgcaaccgtcgccgcgaaaccggtgagcagccatacatcgcccgcgtacgacgtcagcgagtacgtgttttcgggccgtagcgtgctggatagcgtgagcggcacgggggcgtcgtgaaggaggagactgtgatgactagctatatagccgctgtctggctttaccgccgtcgctccgcgtcgcttcgccgccaccttcttcttcctctcagtcatgaaccccgtggatcagccgccgcctccactgccaacccagcagccggaggagcaggctaaagaagaccatgacgacggtgacgagcgcctatttcgcgatccgctcaccacgtacgagtatctcgacgactgtcgtgatgatgaggagttttgtcaccagttcctacgcgcctacctgacgccgattcgtaatcgacaggaggctgtgcgcgccggcctgttgtgtcgcacgcccgaggatctggcggccgccggcggtcagaaaaagaaaacgccggctcccaaacaccccaagcacgccatggtgtacattcgccgcagctgtctggtccattcggcctgcgctacggcgcacggcaagtacgacatccgcggtctgacgctcgagtcggacctcgctgtctgggccgcgcttcgaggcgtgcccttgccgcccgatccgcagcattttcgctggctcaacgccggcgctttccgccgtctggtgcacgaggcgcagtacttgccagagatcagtcgcgccgccaaacgcatcgctttggccgtggccacggggcaatacgtggtgtgcacgttgctcgattacaagacctttgggacgcgcacccattacttgcggcagctatgctcgatgaccgaggagctgtacctgcgcctggacggcaccctgtgtctgtttctggagcccgaggagcgcgaactcatcggccgttgcctgccggcggccctgtgccgtgggttgcccgtcaagtaccggacgcaccgcgccgccgtttttttccacgccacgtttatggcgcgggccgaagcggcgttgaaggacctctacgcagccttttgcgagtgcggcgacgggcgcgacgacggcggtaaccacgacggtaaccacggcggcggcgaccactcctctttgtcgctttccgcggcggcgtcttaccattcccgtttggagcacgccgagctgaggctggagcgcaaccgacacctgggtgcgtttcacctgccggcgattcgccacctcacggccggtgacgtggcccgcgtccagaacagcgtatcgcgtgacctgggcttcgccgactggtcgcagacgctggtcgacgattactttctgctccccgcgggctgggcctgtgccaacccgcgtcgcggctacgccatgtacctggcctccaacgccgtgctggccctgcgtatcattcggctgctgcgcgccagtatacgtcacgagtacacggcgtgtatacgtatgttgagcggggacgtgcagcggctcatcaggctgtttaaaggcgaggctgcgctgctgcgcaagggactcgctcagaaccccgtgcaacgtcgagaactgtcgcggttccgcaaacacgtccacgatctgaagcgcattcgcttcaccgaggacacgttcgtggagaccttctgcgactttctcgagctggtgcagcggattcccgactaccgcagcgtgtcgctgcgcatcaagcgcgagctgctgtgcctgcacgttttcaagctgcgccggggctgtcgcgcgccgccgacgcccgagacggcgcgcgtccagcgcctgctctggcactcgctgcgacacggggacgcgccgcaggatcgcacgcggctgccgcagttcagctcggcgctctcggacgccgagctgagcaaccacgccaaccgctgccgccgcaagaccccgctggaactcggacccgccgtcgtcgccgccccggggccctcggtgcgctaccgggcccacattcaaaagtttgagcgtcttcatgtacgccgttttcggcctcacgaggtcggaggtcacgccacatgaagccgcggcggcgcgttataagcaccgtggggtcatcgaccgacgaggcgcggcgatgacgagcaggcgcgcacccgacggcggtttgaatttagacgattttatgcgccgccagcgcggtcgccacctggatctgccctatccgcgcggctacacgctgtttgtctgcgacgtggaggagaccatcctcaccccgcgcgacgtagaatactggaagctgctggtggtgacccagggtcagttgcgcgtcatcggcaccatcggactcgccaaccttttcagttgggaccgcagcgtggccggcgtggcggctgacggcagcgtgctgtgttacgagatcagccgtgagaactttgtggtgcgcgccgccgactcgctgccgcagctgctggagcgcggcctgctacacagctactttgaagacgtggagcgcgctgcgcagggcagactgcgtcacggcaaccgctcgggcctgcgacgcgacgccgacggccaagtcatccgcgagtcggcctgctacgtgagccgcgcgctgctacgtcaccgtgtgacgccgggcaagcaagaaatcaccgacgcgatgttcgaagccggcaacgtgccatcagcgctgttgccgtaacaaaacaggaaggaaaaaaaacacacacatgaaaaacccggagaagacagagaggacgagcgtccacacaccgctttggtcgtagacgtactttttattcttggtacattaaaaaacaaacacatactttcttgtgacttttttaccataaactgttccgccctgctgcttcgtcccaccatcagcaacagtactccccgctgtcgcggcggtcgcgacggtgacggtcccgctcgtcgcgttgaggatagtcgcgcggtggcagcgggggtggtggggatcggcagatttgttcggggtgattaccgttcgcttccataaacgctttaagagccatctcgcgtaacgtgtcttcttcgcgttcgtcgggggggacctggctaaagattttgagcagggtgacggaggagacacccgtgtgttcgaccggaatgtgtcgactcgagggctgcgcttgcaaccgcgccacgcatatgtcgcgggtgatgagtttctggcgcaggtgggtggcgcgcgggtcgcgcaacagcggatcgcgcaccataaactcgcctacgaggcgttgggagctactgctgccgccggtgtcaccgataataggtctgtcgggacaggccagcagacgcagggcgcagtacacgtagtcggtgcaaatgaaggcgtcctgctgacgcacgacgcgtaaaaagtcaaacaacgccggcgtgctcgcgtagagcgcgtagtcgtagttttgactgacggcccagtagatcacgtcactaagctgcgcgtagtcttcgcgcaacgacggcagttgtacatagatgaggtaacacagctccgagatgctctgcagctggtgctggagatagcagcgcagcacgcgaatggtgcgttgaaagtgcgtgatcataagctcgacgcctactaggaacgccagatcgttgagcgtgtgctcttcgcatatctcttcgaccgaaagcagccggagcatgccccggtggttctcgttgagccgctgcaggttttgccgatagaggtagagcgcgccgcgcgaggtgtagtgggcggtatagaagagcacgttgtaatcgcgtagcgtctggtagacctcggtgagccgcggcgattcgggcgtgccgcgatgccgcagctcttcgtccagccgccgcagagacgtggcgtactgaccgtccgtcactccttttcgtgacgtgagaaagtgaagcgctagcgcggccgcacgccccgaacggctctggttgttgacctgcgcggctacccggcgtaccgtgtcgccccgcacggtggtccgtatggcctccaccatgtggcgcgctttcttttgcgccacgtagtaatagttgatgatcaccgcgtgcgtgattatccgacgcgtgagatcgcgctcgccaggcgctacgttgtttaagacggggtcgacgaggctggtgagcgcgaaggccggcatgggtatgcattcgttgaggcggcggaggtgctgcacgtcaaagtcttgcagcacgaatttgagatactcgacgtgctgcggcgcgaccacgctgggctcgaagcccagattgtcggccacgctgacccggtaacattcgcgctcaaagtcttcgatgtcgctgtcgcagaaggaaaactcatcgccttcggcagcggacggctcacctggcgccacgggactggtgcttctgctactgttactggtggtgcgactgctgctaccgccgctgctgctgttatcgtcgccaccgccgccggcgccgttctcgggcagcgagggcacactaggcggtcgcgagactttaggcgacttgccggccttgggtgtcgccggcgagccccgaggcgcgcccgctgcgatctgcggttgccgacgcgacgacgatcgtttcttttcgctcggtttcttggcggcaccggcgccgccggtctcgcgcacgagctcgaaggacgacggagcgtccgaggagacgctgtagggcgacaaaccggcctccatgcgatccagatcttccgtggcgctgcgcgcccgcgtgctcgtgaaaacgctgtcctccgcctcctcatccgccggcgtgtcctcgttgctcgaggggatataaatcaccgtcgagggttcgccagagcgacgtgacgagctgcgacgccgcgacgacatcctctcgtctgctgaggtgcgttcggctcagttgcttacctgcatacatggaggagacccgggcgggacgttatatagtgagggccggctccggcgggcaaaccgaagatacagcctcgggcgcggaaagtgtcctcgccacgctggccgcggtgaggacaagaagacggagcgtggtgtgcgacgggcccccgggctcgcccaccgactcggcgcgtcacatgagcgatctggctagcctggcgctcacggccgagttcggcctgggctgtctggaagcttacgtgcgcatcaacgcaggccaggtgttgcccgtggtctggccgccgggctggaacctagtgctgcaggagatcgagacggacgaggacttcaaaccggaggacgtgaaagcttggagtcactacctgtgctgcgagacgcgcctggccttcgtgggtcgcttcgtgaacgagggcgtgttgtcgccggatcagcagaagaagaccgccgtgtgcctcatctcggacgagggctatgtcttttgctatgtacgcgaggacaccgccgtctactacctggcccgcaacctcatggaatttgcgcgcgttgggctacgcgccgtcgagaccctgcactgcatgcgctacctgacctcgtcgttggttaagcgctactttcgcccgctgttgcgcgcctggaccctcggtttggataccatggcgcgattcatcatccgccaccacgggcagttcatgccgctgacgtacccgccgggaacggaactgcgtctatgcaacctcaggtgtttcgaaaacagcgtggaaggcggtcacttgctgcgcaacatcaaagccgctttcggaatgcgcgttctcggcctgggaaccgtcagcctcaagggcgagaacgcgccctttcctcacttgcgctggcccgtcgaccttatccccatcgttgtcgcctataccggggccgtctacgcctgcgacgtgcgcgacgaccgctacatccgggtgggagataatctcaacacgttcatgtgtttgggacttaacctgctgtttgaaaaccgacgtttcagcggccacaacggcatctacgatcgcgtgcccgactgccccaaaggacgtcagcaccgttgactgtgacgccacgagtgacgacgacgctgcttggggcataaaacaccgacgctacttcccgtttgactcgcgtgccaattttttcgctgccaacgccgtcaaggccgcctcttctggccctccgccacccttcgctcgagcacggcggtgtttcgccgtcgttttttttttctggatcggcccgatttctttttgtccaccgacgcgcgaccgcgatgtcggtaatcaaggactgttttctcaatctgctcgaccgctggaggcctcctaagacgtcgcggccatggaaacccgggcaacgcgtggccttggtttggcccaaagaccgctgcctcgttatccggcgtcgctggcgcttggtgcgcgacgaaggacgggatgcacagcgtctggccagctacctctgctgccccgagccgctgcgtttcgtcggcagcatctgcacctacaactttctcaaacacaagggcgatcacaacgtgccgtctgaactgtacctgggcgcctcgggcgccatgtacctgtggaccgaccacatctactctgactcgttaacctttgtggccgagagcatcactgaatttctcaacatcggtttgcgacgctgcaacttcatcaccgtcccagaggagctgccgcacaccgcctcgcttagagcgctggccggctgcatgcacatccacgcgttcgcgcagtggcgtgctacgtatcgcggccgaatcatggtcgtgggtgattacaccgtcattcgcgtctccacgattcggctgtacgactggagcgagattaacgactggagggtcatggtcggcagtaaccacgtggaacctttaggctggttggtgagcccctacgacgtgatcaacctcttcgtggacgactgtatgcgcgtctttgctgccaacaatcagcacgtttgcatcgtggccgacagtttgatggagtttgtgactcgcggcatgacacgctgccacgaaaacggcatttattacggaaccaggagcatgcggaagctaaatcagcctacctgtccttacggagtggaccaccaactttttgacgacgcgtgaacccgcgtctcccacggaccgtgtgcctttttttttccccgttcctgtaaataaaaagctgttttttatttttcatacgaaccgctcgagtcgcgtgtgttttgacggggctgggtggggagggaaggtcgcgccgccgcagcatcccgcatagcctctacaaactagcattctggtgagatacatgttcataaactctcacgggaaggctagttagacaggctatgggaagaaaccgtgtttcgcgtgccgaatacgaaagaaaaaagaccggaggcggggtgtttttagagcagaaccttacagctttttaataaaaaacaagatagtcaacatggtctttaacccttgggatctgccgctgttactgggtcttttcattttctttggtgtgttcttccttgtgttcgttagtcttctcttgtggttgctgatggttacctccatctgtgtccgtaatcaaaacgtcatagtctcccccggagtaatcttcatctccgtcggtggtggaccccccctgactgagagttacgtctttgttgcgagtggtattaccatcggagttagtgctggtactgggttgttccaccgtcacgctgcaaaaacacaataaccgcgttcacaatcacgttatttttttgtatttcttacctgtgttgagttccccagattccgtttacctgcgcttcgatttctgagaaggtgccgccaaagccaccgtcaaggtcacggctagtaagctcaggatccatagcctccgagccatgctgaggtcttgtcggcgtcgctgatgacgaacgcgtctggctgtgtgccgttaaataccttgggtgacgacatctcgaggtcatgtggccgcttctgaaaaacaacgtagtccggacgaaccgcagatacgcggtttttcaacctcgacggtttacgcctcgcccccaacatgacgcgttcgggacgaaagacgacgtcaggggattcacggtatttagccatgcagcgtgcggcgcctctctcatggatccactgtcaccgtcgcgatgggaggtagccctgttccccagctcaccaccgtcactcaaggactcatgccatctgtgcgcatggactttcgggctcgccggcccttgcgccgcttggctttctacgcgccgcgagctcgtcggaggcttttccagaatcatatacatccagaacagcgccgagtgctggtcggtgagggagacgaagagatgttgccggatctgccgatggagatcgacatcgtcatcgaccgacctccgcagcaacccctacccaatccgctggtgctactgctggacgatgttcccccccatgtacccggttttgctccctaccgcgtcccccgtccccaccccatgattcccgaagaacattgggaccagttttaaataaaagcattttatttacatctgtacagggattatataaaagtctgtatatccagtccattgtcagtatttttgtgcttaagttcagtatagatttatggaaaatatgtagtccgtaccgcttggggctcagagtccaaagtccgtcatgctggcatgcagaccaccatgtgcatgggtccaggcgatggcggaggagacggcgggaattctattaagtggggaggtcgtggaggcagcgggggtggtagtacccacattttgctctcccggatccaagggacgagcagtcgccgcgtgcggataggcacctggactttaatgtcctcgtgcgttaacaatttttctttttcctcctcttcctcagtgaattctggcaagagttcaaagccgcgtgggcatatcagaagccggccacagcgatagtaacagatgaggatgagcagcgatagggagacgagtataatagatacggtacctgtgattcccgcgcaggacacggagaacagatacatgtatctacgacccttgtcgactatataagcttcctgaagtccacatgtaagcactgccaagggggtcaggataacatagtccataaattcttttggtacgttaccttcagatttgttgtaccattctaccgtagcgttcagagtatactgtttaggaagcagcatgcagcgtgtttcatttcccagcaactcgactttgatagtgttattaaaagtaatattgatccaatttttccatagctggcacatgccggaaaagagatatttcgaaacttgattttcacaggtgctattggtatggttgtaagcatttccagaataccaataagtattgttttgagtgcagttcagaagccagagggtagtcagataggactcaccgcggttgatgcagctctctgtcagattagccacgctccaattaccctcagtggaagagttggttattgatgcgtttgttaaagtgaagccaaatgttccagttaagttagtgtagtttgaatacaaacccccgatggccgtgcgggtaactccgttgggaccggtaaggagagacacaaagatggtatcggtattgttggttcgggtgccattgagcgttgtcaactgtatccagtagtaatccagcatcaccagcatagcccgtatcccgagcatcttgccggacactgaacataacggcgtttgtatatataaagaccgttccaacgcaacattgaggtgtcattgacgtctttattgacgtggttttaccgcaacttcctcttttcgtagattgaatgaggaaccagcgtggattccaacgctggtttcatcataaaccaccgtgaaaaccagacgcgggtttcgacacgaaatcgcgtcactcacgtacgtagattatttcgaaaacctacgttaatcctgaacgcgtttcgtgtcacgcgtccttacgactcacatctagctcgtcttctgacgctacccacgaatttcgtaaccgaatccgcttcagcgtttccattaaactggcgcaatccacttctgactgactcggtcgctcgatgcgcacggacccgtgatctaacacgaacatagtgtagtgggaattcgtggcaatggacgtcaaccgaccgcagaacccatcacgagtgcgtcgcgtgagaaacatgaccgtgttgacgggggcacgcggtaaccgacgtcgaaacagctcatacagggcgttgctggtcatgacgaccggaccttgcgatagcgccacgcaaaggccaggttacgtaggtattgtttcaaggtggtaaagtagtgcaggaacgcgaatagcaaagcgcataaaagcagggctaggaggacactgctgatggtcatggtgttatagcgtttgttagctgtcggatgatcagggacctcccccgaggaactgtcgtcaggtgaggtaacgctgatggggatttccaccgtccaattaccgtgtgtaacgcggcaggtgtagttttgattgcaaaagatggctacgtaacatccctgatggaaagtcccatcgaaggtgggaagtagcggattgcattgaggctcgctatcatcgggcgccttattaccgtaatggataaaagtaatattaatttcccctggaaagaacccgtaagatgtacagaacgcttcagctctgttgtcattgtggtttcggacaccgcctttcaccactgggtgggtgacgggggtctgaaacccgctatagatgacggaccactcggtgcagttgcccataagatagttcctttgtattgcagtatccccctcgctgatgtttttaattttaccgtcgatgtacgttttgttttgcttcaaccaactaatttcgtaattggggcccgtccatagtgtcaggttatccttgagctccattaaagtttccccgtcccacccaaatccctcgtaaccggctacaaaactaccgttttccgtggtattacactcgtgtgtccacgtcagcacgctctgtgaccggtaacccaacgcaatttccagctctaacaggttttgctcggtttggttaaaaataaggtcacctttggctttttccccgtccaggtaggtggggtaggccgccgagacgttggccatccaagaaatggtaccgttggcccgacttgacgttctatcgctggaattaacgtgataggtaaaaaagtgttgcccgtcaaaaatccccacgacggtcaacgtcatatgcgactcaccgaaaattcccgtgtacccgtaacgcaacacgtgcattcccaccactctcaacatccacagcacaaataacgtcagacaccacgttgtcatcatggcgttttattaacagttcctcggacatgatcggcgttatatactttcagtccacgttttgacccctcctatcttctttgatgatgtatcctcttagccgtgtgttgtttactcctcctcttcgggagaccgtgccggatccgacatcagtggctccgagtcctcccgaggaaagaaaagtcgtcgaaacagccagcacaaatcgtgccaaaacagaaggacggccgccttttttcttcttttgggaatctcggcgggcctctgggggccgcacggagcgcgacgtcgaggtagatgtttgcggcgcctgtggtaaaccgtggtgtcccaggatctcttagacacctgttcgtccagaatcaacatttccaaccgacagtgacggggccggccgacgaagtgtgtgaagagcgcgtgatccatgctcgtggcaacggcgtgccgcgctcgtgtcaaagagacccgtccacgggggacatggccttcttatagcagcgtgaacgttgcacgtggcctttgcggttatccgttcagtcctcggtgcgtaaccgctggtatcgatgcggcaggcgaatgcgcagccgctgccacagtcgctgggggatccgtagggccaataagaagaagaacagagtgatggccgagaccaacacgatgtctctcgccaaggtcgcggacagttcctcgtcggcgcttacggaggggtgtttggcgagcccggatccgggcggtctcggatatagcgagcccaatcggacgtggaggcgctcgattattttcgtcgtaccgttctcgcagcgtaaacagtcataacggcccacggtaaggttagtgaccatgcggctggtgtacagtttagtcacagggacggttcgcattttcagtccgtcttgcaagatgttggtggtgatgtcgctgaaattgcggatcaccgtatcgttctggtacaaccacaggtcaaccacagactcgttatgctgccaagtaaaagccacgccgatgatctcgtcctcggtcacattctcgtagtagcagatagagatacacatcccgtgtaacgtccacgtttccccaggacggatcgaggccaactccgtcacattcaagcggcaggtagagtttgaggacttgctacccaggtcaacagcacacggggaagaggcagataagcaaagaataaaaaacacccatcccagcggtaccgtacctcggcgacgctccatgccggcgcctgacggtcctttgtgcgcgctccccataagtacccaggcttttgaccccagtcggtacctacgtcagcatgaagcccggtgtccgaggaagaagggggagaggacaacgaggtccccggtaagattaagggtaaacatccgaaaccggtttatccccgccaatattcccaataaaatacaaaacacgcgttccttgatatggattcaaaatttattgtgcgcgataccgcatcgccaaccacgaacacagtccaaaaaacagaaacatgaaccacagcccaatgtccgccttctggtgatcggtccgcgtacaggcggacgtttcatttgccgaaccgcgtctggtaccgctactgtgggcgatgggaccgacgtcggagtcgcggcgttcgttggcgccgctgccgcgtcgggtaccgctgtcgcagatgagcgcaccgacggcggagccgcgtcgctcgccggcgcccgtcatctgacactccgttttccttccgtgactgcgaatcatccgcttcatggctttcctcgtttactcccgccgctgctcttcctcagagacggccgccgccgctaccgcagaggcttctcccgcggcagtttcctccgccgcctcgctttcctcctcggtgtttagacgccggtacgattcggaacaccagtagcacagcaggtggcagagggaggtcagggccaccgatcccgcggccagcagcccgatcttcggatccgtcagccagtaatccctccgcagatgatagcgccgcctagcgccgtctacccgatggcggcggctgcagttgttgtccgcgatgctctggctgatgaagggcacgcacagttcgcgctcgtcctcctcgcacgagggcagcagacccgaggtgccggggatgtagtggactacgcggtgccgttcaccctcccaaccgcagtttatactgcgcaacctggagggatcgggcgtccacaggtaccgcgtctgtgagcgcgatccgaaagccaggtcgcaggagcggtccgagtggcgcaggtcgtgcacgtcggccaccagcgccgtggtctcggtcgccaggctgtgggtctcgttgcccagcacgcaggtgtaggtgcccgcggtctcggtgatgagacgaaacgagaggctcagccgctgcgccgcgccgccgtcctcgaaacgccagcgcccgccggcgatgtaacagctggcgtcgttgtgtaacacctgaccgctgcgtgcgtccaccaccagcgaacgcacgatctcgggccagtagcagaggtggactcggatagagacctctggccagtcgtgcgcggggaagatgcaggccacctccagacggtcgccgtaaggcagcaactgcggtgagcccgggttccgctcgcggttgcggtcgcgcaccggctgcagacagggcgaacgcaccaccggaggcgcatcgagacagcagttgccccactcgctccaggcgatcagcagcggcagccacagcggcggcagccggccaccgcccatacctgtctgtgtttcagagctccttaaaaagaccacacgcgaccacatattatatataaggtgcgattggcagattatctttattggtagtgtttgacacgcataagcgaccggggatggagggaaataaaggaatggctcggtgtattctaaatcgtcatgggccgtcgaaccaggtagctcgagacccacagtcctaagcatagacgaaacagggcacgatgcgggggttcgcggggcggacaggccacggtcagcgtatttgtcgtcattggcggcgattcacacggtccaccttcctcgttctcctcctgtgacctcctattcagttctccttgtcccgctggataagtgacctgcggctcttgaacctcatgatcatcatcatatcttcccgcattattccttctctcgtcgtttccacttgctcggctcccatcattcccttctctcgcgccctctctcgaaacgtcctccacttcttcacgttgagtgtgcgttgaatttcttgtctcctctcccgtaagctgttgacgtggttcctcgttctgccggagcaccgtgggtgccggcggtatgacggccagttcttgcgcttcggccgccgggttctgtcccggaacccacgtgcgacgccaaaacgtggttctttccacgaaccacgtacgtactcgcgtggccgtctggctcacgacgttgctttcctcccagcgggttctgatttggctagagacctgctgtgtccaaccgtggcaccgtaggcggaacagctgccagcggaccgtcagttgttggcgtagttgacggagtcccgcaccgccgggtcgcggttcgccggtgttgggaccgcttcccgcgggatgtctcagacgcccgcgtccgaaacaccgttggttggagaagcgtattcgcgtcaagagcagcgagtcccggctgcggaccgtcagagcgttatagcgccgtctttcgtgccgtcgccgcactgcgttctcactcgcgtcgtgcctgacggtgctttctgcactatgtggtgattcggcacgttctgcgtccgcgtctcgtgcatcctctgccggctgtgatggtggatccggaggggggaacgagggtctcggaatcgcattgcgcgactgatttcgccgccgttgttcttccaccagatattgcagctcttggtactgccaacgtatcccgtctcgcgacggcagttcgggtgatacggcgtgatgctgtgatgacggcggtctcaacggccgcggggaacgcacatcgtagacgggcaaatgcgggagcgatcccgaccaaagcggcggtcggtccaggtcaacggcgtttcgccgcgtcatgaccgacgctgctctgacttggaatccggcgtgctgcatggcttggcgcactatggacagctggtacgtcgctccttgtatctcccgtagccactcgtcctcctcgacaatgtctaagccgtgggcccactgcggccgctggaaaaggagcaagaatggcagtctacacagcagcagcgggagcagatgataacgcaagaagcgaccgcagtgggcccacagcatgctcttggtctttctagggccggtcaacagctttatgaaggaaatcagggacgtcggctttggaaagccccctcggatcctttcggtatcgagagcgcgcctggcttcaaatacgtcaaaggcctgtccgccgcgccagctggcacggagttggcgtttcacagtgatttcatgcaatcatttcctacgcgacttgctcacagatcggtttgggggatgagcacgatgccgtgcttgtcatgctgccagagcaaccacagcttttgtggtattcgaaagtagaaaatgataatgatgataataacgattacgaccgctaaaacccagagggcgtgtgtagccacgtgttggtgctgtgggcttggttgtaacggtgtttccgctactgtggcttcaaaaccaacgtgatgttctacgtgactgttaggggtggtggattttttgggactggggtgtttatgatgggtagtgcttatcgtcgtcttcttggcggtggcggttgttctcgtggtggttgttctttgtgttgtggtagttgtcgttctcgcagtcgtagtgggctttttggtggtggtagtggggaatgtaccgttttcgttcactgtcagattgtaacatgtgtctaaagtccatcgagaaccatggttatgtcgttggtgaagccaatggtctagtgatgtcatagtacgataggtggtgctatactgcgtggtaacgttaatgaggagaaggctgtaattgcttagacatgaaaagttaaagcgcgtattgttaaatgttgttgttgatgtgccagtgaaaatgcataacatgtagccttgcccacctggaccgtatgaccaacgaacttgatcgcgagggggaagaacatctaccgcgtttaacgtaacgttggtacctattttgccgaccaccggtatgcaggcatcgtggaggctgatgtagacaccaaagatgcatgcagccgttaggtaaagtaccttttcgcgatgaaaggtaatgtacctgaacagcattctaccacaggtgatttccacatgttctcaggttccgtagggactgtccctatattcaaacagtgagtttgaaaccgaacatatccgtccgctcacgataattagtccgtagtgggcaggccatcggttcctttgtaaaggtatcccttggtgtcccatttctctcggagtctttgaggaatcttgaagaagaatagaatgacgactatgataatgatgatgataatgagaatccatgcgctgtgtgcggcatctttggttcgatgtgcctctacgttaccggtaaacgagtccgcaaagccttttggaaaacccgttacattgtaatctttaggtgacgttctccgcgtggatcttttgtgctgcgtatgtttatttggcgtggtttttaatcgcaacaacgtagttttttgttcgggttttctggtcgtagttctagaaatcagcgataatgtaaaacatgtgggaaactcacagttaccctttggtggacattttcgcctgcaatagtttctgggatctgagacgtttacatgaagaatgcttaatgtggaattgtgacactcgtacaacaatggtgatggcaacggagtagttttcattgtcttttgtctaccaggtttaggagggtcgtaggtgcagataggatgcgtattttcgccgttgccgatgccgacgcatgactggttataccagtgtactttttgtcctggatgataaccatgtccactaccgagggtaactggatcacctactctgacagtgacctccatacaggtttcggaatatctgtaaaatatcattgcggtcacgacggaccatcggaaaagatcatggttcacgatatggttaatcagttgccgcataacacaaacacctgttgtataaccacgtatatgtacgtcattatgtttacggtattcaaacagtgagctgaaaaataaacgtacatatctattctttttacgttttgatttccttggcgttgattctttaagcggcggcgagcataccgctgtatcggtattgtgtgaatttattccaagctttttgggggaacttgaaacaaattaaaacgatgattgttataacgataactaggggtatgatccacattgtatgtgaagtggcagtgtcgtgttgtgcttcaacgttaccggcggcgtagtggaccgcggtatgtgtgaagttggttgaggtgaatgactgtgatatttataatgaatcgtgtacagatgtaggtggatacagggatgatgtagttgtatggcaatgtgtttggtgggtaaagtgtacactaacgttataacacaagttattcggttttggtactccttgtccgagatatttaaaagattgaaaataatagtttctactgtatgttgtggttaagttcatgagaattagtgtacgattatctgtgcactgccacataatatttggagagtctagattggattttatgcgttcattactttgataaagacataacttgttagtaaccattggtttgtctatgtaccattcaaaaacatcgtcttgaaataatgagttattaagcggatgcaagctaatattatgactgccgtatccaactgtaggggtacatggtattgtcatatagttccaatactgggattttgatgtgtaaaataaaattgttatccatggaaatacctgcaaacgcttagacatcactgtcacagttccgtgtctgtcataaacacttgtccgtactgtttactgtctttccagtgatggtagatttttcgaggtgctcgtagacagatgataataaaaatgatgagaatgatgacaatgattagcatccaagaataatgcgttgccgctctttgatattgtacttccccagccgggtattctacaggttgtgggatgaccgtagtcgcgttgctgaggttgactgcagtctccgtgcttttcaacagcgatgcactgcttcctaacgttatccagtcactggtatttgtacgcgttgtattggcagtttccgtgagttcataatttccgtcataattttccgacgcagatagtctcgagctagtcattgtgggaacaaaaccttctccctgataaaaaggacattactataactctgatttactacacaacaacttccaccaccccataatacaaacaactatcagaattaaaaacacgacaacacctaccaaggccaggtgcgtgttgttttccaaaggtgtctgattggagaatccagcgacggcacgtagttgtggtgcgaaactggcgttccacgtaacgttactttttgtgccggtcaccgtcggtatcgtcgtgacgatggttgttacgttactaactggggtagtttccaaagggttgggtttcacggttaagttataccacaggaacgtttcattttcgtcgcttctcacaaaaccttctgctccgtaacgaccggagtcgtttaacgtgaggttgaaaatggtgatctggctagccgcacaacttaggcttaaacccacatagggcgtagagagaccctctccacgtttgtagaagcaaatgaggtggctacagttgccgttccagcgaaaccaccgtacgctgatgttcgaagtgaagttagacaccagggtaacgttccctccctctggtgcatacacgtagatgacggattccaaaatcacgggggcaaacaacgtcaaaatcaatagtttattgtacatatgatgcactgtccaacggaatcgtggaaccgtcagaagatgggaacccgcgccggaaaccatgatttatttaccacgttacggtttggaaacagtcacgctcaaacagtgccttttatttcctacgttaacaaaccacgttcttcatcgtccacgtggcttcgccagcgtcgccaagccgattgaggcaaacccaaatcaacgagcaccatcacggcggcgaacagcagcatcgcaacaccccagctgccgtaggtgaatgccaagttagttatgttcttggataacgtcccgttttcgacacgccgttgtcgttgataactaacgtgttcaaacgcgttcgaatttaccgttagagtcgacgtaatgggtgatacatttgccgtggcgtttgtaactaccgtgggtgttactacggtggttgtgctctgagccgccttaggatgaactgtcaggtcgaaacaagatagtgttatatgtttgtcggtacagttgtcaccttttcgataataagtgccgctatgattttgggaaacgttgtatataaaaaacgttgtcaaagaacagccgaatgctacacggtgtcttaatgagactcgggtatacggtccccatagggtacaccacggccccaacgtgctcccattttcgtaacgtccccactgggtcacgttacaacctggtgacaatgtgccgcacaactcagcgttttgtcctgctgttctagtcaccgtgctgcagttgagtggcctgtgaattatcacagagctcgtggagcctttaaaagcacaaactatcaaaatcaaaaccagcacgtatctggaaacccagactttattaaaaaggcagcttgtcatgccccggggcgttcgggcaaaagctaacatgttgagtgctacatatgtgcgtgagcgcgtattcaaacagtgagttactaagcataccccagcccgcccgttcatcttagcatgcattacccgaaaaggtccctcccaccccgtttcagactctccgactgaaaacaaatacgcaaaagcgaaaaacaaactatacacagctagctaattagctacacggtggcgacgagacgttgatagcggtatttcagaggacgggcgatgtcccgtagacggtctatgcagaaacgacagatggattgcggcacgcgaaacaggctggcgaaaagcgtcaagagtcctagcaagacgaagccggtgacccaggtggtgtggaaaatcaggcctccgtagaactgcttagtgatgatgagacgactccacggaacgagctcttcttcccgtgacaacagcatcgaccggtcaggaggcggcgcgatcgccagggacggtgtgcgagtgctcatgccggaggtgaatgctgcttcgtcccttgatatagccttgttactctccgcctcggtgatgtcgtaacagcaggactcgaacgtggcacaatcatggagacgcaaaccgaccaaccatacaacaaacacgagcgtcaagcgtgatctagatacacaatacacagcaaagccgggatctacacagtcagagtagcctagaaacatgttagcgccgtaaggacgcttaacatttcaaaagcaacgtaaacacaatagctacagccacgcggctctgtggaactttacatgcgtttaggtcacggtcaggttgtaacaagagtaataaaaggtggaattcacatcttctcgtttgaaataatactttccgctgttttccgtcgtcagattcagcaacgtcaggcggtcataggtacagttatacgtgagattcgttattccatacatataatgttgttctttattgccttggagtttcggaaaaaatgaacaaatggacttatgaccccaccctaacagccagtgcaaaaaatcttccgttttgttctgaagacctcgaaatgtaacgttgccgttgacggtccctgagtaattagcgcaagtaatattcataggaatctgacggtcgggagacttccattccacgggagcagtcgtcgtgctgattgaacaactcacaaaaatacaaaaacagtacgcgtcaagcagtaccatcggtaataatatccacgttctaagcatcataacgatactctttcagtctcacaatcaaaatattgcactgatagtggcgataagtgatgcaaaaacaaaaaaaaaaggaacgtgctataatccgggtcaccttcaccgtatccggacaacggtgttttatggacttatcgcttaaggcgggatgtatttgcaaatcagtagagacgacagtttcttcgccgagagaaccagcggctgcatcacgaaggcggcatctgattccctttatctatttcactcctcatttatacatatccagacctcatgtgataccaggatcatcttacggggaaaaacccttctcatatccagtcattgggtcccgtattgtcccttgagaattcctcactatcccccgagccggaacagaacaattccaaaccggatacgctacataccagccacacagggtagcgtttagcatggccgaagactcggtcacgatccttatagtcgaagatgacgacgcatatccgtcgttcggcagcctacccgcctcgcacgctcagtacggctttcgactgctacgcggcatatttttgatcatgcttgtcatttggaccgcagtgtggctcaagctgcttcgagacgctcttttgtaaaaacacgtagaaaaatctatgttttatgataacatgtcactaagaacctgtactttatttcaattacgttatcatagactgtaccgtcctggggtacggtatgtgtcacgcgtctttctatgcagcgcactgtacgccgatacacgggagtaacgaaggaaattctactcggaaatccgccttgtccggagacggagtaggaacacaatgacgtttaaagtaaatacaaatgaggcacatgatgcaaataaagatgatacatagaagtattttattgcgatccttcatgacggagtggaaaagcgggaccttacagtttttgagaactacacaaagtagtaaaaatgtaccctaaataaattagcgttggtactttgtgatcacattgtgtggttgacgttgtttctagttcgtagtctgtgcttcagggttgttgtaacgttaacgtaagttaaaacgcagataattatcaccacggtggctgtccaaccaacgtgagtggctacgtgggaattggtgcggttagaataacgtgaagacgagacagtaataatatagtgagttctatttatagtggtgttacagttgtcaaagtcctctacgttatgtttatgatcatcgctgatgttgcatggaatgtcacagtaataaacgtttcgggtataaattcctgaatcatttgtagttacgttgtgtagtttcagacctttagtatcgtgaagacaggtaaatcgtgggtgacacgacttgttttcggaatattcagcatattccgagtaaaatggtgtccaaccgcaaagttcgcagttattgtgattccagtaactagaaaagttgcaggggttatcactaacgttaaagcaaattgtatctccttcggctactgtgatgggtatttgtacatgtccactttgcagcaagagctgctggtaggatgttttttgtttatgtggaattgcctgtaccagaatgctagataggataattgttattagtacggctagtagcagcagtttactgttacatcgtacactcatgtttttaaatgtctatggatatcccgacttataagtggttaactcagaataaacacacccaaacattaatgactaaagataaaaaagtttattgatgtgcatattaggttttagtccaagactcatctggatcgtatttaggaagtctggtataacgcggtttcctgggtctgcgacggttgcccatatatagcgctatgagtgccaccgatactactatacccgcccatacagcgtgaattcccagaggaatgttggctttcttaatagtttcaataatatgtttcccgatttcatggttagtagtgtctgtattttctgttcgttttctatcacacgttctgttggtaactatggatgtcgtgttggcaaaaatcaccgtgaggctgtagcatgcttcttcgtattgtcatggcgcgttctcttgacaacgtactttccagaatcgtttaacgtcagatcgtaaattagaagttttgtcatgtcacaatcaaagcaaagagcaccacgagggaaagtatgatgataattgctggtaacggtgcatattggttccgaggaataaagccagcctggagaaccgtaccggaaccattgaatgtaattccatgatccagtgaagtttagagtcacttcttggccaacatatcccgtgatattatattcaaatcgcgttttcggggttgtgatagcattactcgtatgactgcggttggtttgagatattatggttgacgacgctgcagtagaaacgactttgccagtcgttactaacgagggtgtagtggtagcaatacttgacgttgtttttttggaatttgtcgtggtagttggagtgatgtttttagacgttgtttcactggtggatatgctaactgttgtagaattgacacaaatgcaggggcacggacaagtttggttgtaacattccgaaaacgttaatatgattaccgtccatgtaatcgcaagatgccagtgcatggtaccgctattggatggatagacattagtatatctttgctgtatttcatggtagatatgttacttaatttcatgtgttgcgtgtccggaaacgtcagtcttcatgttcaggatgatatcgtacaacaaagctagattcactaatatcgtcccgtaatggacggtatcttttattgagggctcgtcgaacaaaaaacagaagtatgcaggctatgcagattagtgtaagagcccatgtagtgcgcgtgccatgtgagatgtcacggtgacttgttttgcgcatgttattatttgtgatagtgcttagtgtataatcgtcgtcttcgtcttcttctgattgtgttcctacgtatctgggacatagtggggtggtatgattgtcagtgtcgtttctgggatttacagttagtccgaaattttcatcctcgtgtggtccatcgtggttgtactctttgtaacaccgtcgactatatctgcctgaatttgtagtgtttaaatcgtatatacgtagttctgtcttattacacgaacggcatagatcgtggtacgccgcaggtgatgagacgtcaggatgacatatgggatgtgatgttaagatcttgtgtcgatacgttggcgtttggtaacgtctattgggataaatgtggtgtccatgtgtagaccaattgtaatgtcggtaccaaactacattggggcagttccatgttgaattgccctgtatcgtaatgttttttccttcttctgccgttaatgtagttgatttaacacgtattgttccaatatcttgttggcaattttttgaacttgaattgtttgtttcattagctgcgacagtacaattaacagcaatcgatgttacaggactgtacgtagtgttatgaatggttgacgcgttgatcgaactttcgctggacgttatgtctgtagtcgtattatccaacgatgtggtgtataatgttgcgttgttggagagtattggggaatttgtgtgggtactggagagagcagtaagagttgaagctgtataagacgtagtgttagtcgaggtgtttaacgtagttatagaagatgcggccaatgtatttgtagtgctggatatggtgtttgaggcggttgatatctgtgagccagtagatgtatcaagagttgtaaaaaatgtactgggaagatttggagtagagtacacactagtatcagagacggtgctatctgaagtagacgtagaattattggtatcagtgctgttacatttgcccctatatacaatgtagaaggtcaggattatatataccgtttgtcgatacgtgaagttgttgcgtttttgacggtcaacacgcatcttttattccaaatctccgtccaccgtcaacaacagaggttccgtatccaggtccgtccgcagctgttcagcgtcctgttccccgattcgttgcgaccgcagaaagcagatgaccagtgcaccaacaaagatcatcagtcccgaaacccaggcgcaatggagtgagaggccggaccactggcgttttaaatccgagataattgctcggtctgcctcttgggaatccgtaaccacaactctccctggtcccggataaaagcatcgacgcgtttccaaagctcggcagaagctgcgtgggtggatgatgaggtagaaagcctcgacatcgccggtatactgatcctgcaggaggtagactcccgtatctttaaccgtaagattgtacagcgtgagattttggcgcgtgcacgtgaaagttgcgccaccctgatgcgtggtttctttataggcgtctgtaatgatgcaaagtggcggcatacgacgcatgtatctgctgtagatatcataacgttgccagactacgctgtgatggctagtgttaagcctggtaaccagagtacgtgtacggtcctcgcaggtggcgcggtagttggcgagctttaggggttttttggttggttcgacggcgttcgatgaacttccctgagttgtgaacaaaaacagcgacgtgactatgacaagcgtgaggggggtgctgtaggtctgcatggtgcaaaacacgttctcgccttccttgtcagacgtcgtcgtcctcgtcctcttcgtcgtctgtgcccgtcggttcgatcaacggggagttgtcgttctgtctggagggtcggtatggaatccgttcgtagatgttctgctttttagccgcgtgttgttccagctttttgcgtgtcaggctccgataggccagacattgatctacctcggtgcccgtgttgtttttctcctcctcgcgcgcgtaaattacgaagaagaccaccagcaggactatcagcgtggccacgaacgagcccgcgccccaggccgagtatgcgcctagcatggtaatgggttctgtgacccggcatttgcacaccgcgtggcacttgctgccattgttggtattagatgtggtattcggattgcacttacatgtcaggtgggtattttctgctttcacgagacagttggtggtaaccgtgttttcggcgcaaacggccacgtagcttatcaagccgagtgctaaaaagcacaccgcgtgcattacacgcggatacatattaaaacaccgtgttccacaagcaccgcacacgtcgatcctccccgcacggtcttcagcccgcccatgacatgatctccctcacgttacccttcaacaccctgtagtactctgtctcggcttccggtccccatgtcctaatcataacaaaacaccgtgacactgtccatctccctgtcttttcgcgccgccggtcccccccaaatcatgtctctagatgccgccggccaccaaccggaggcacggcggctattggattcggcattggtgcgccgcgtcttggcctgcatgatcatcgtcatcatgattgccattagcatctggatcctgacctacgtgctgtttctctaataagaaccccggcccctgacggtaattttcctttcttctccgtttctcctcagctgccgtacgtgatgcctcacggccatctccgacaggtcctctccccgacctcctggacatgtgagggcttgttgctcctcctgggattgctggtgctcttctttcaccaccacaaccagtcggccgtggagaggcgtcgccgcgtctcgttcgtcgaggccgatcgactgccgcatgagagcgggtggtattcttccgatgacgacggagaccgggacggcgatgaggaaactggagagagccacaacagaaacagcgtgggactgtccgctgtttttagctgagactggcgtgcgacctgtaaaccgttactcgggtctcaagatggtttggaagttgtgactcatcttcctgtgggtgatacccaaccggacgcgagtgttccataaaagccgggcgctccggcgagaccatgccatcctcgccttcggacgccccgctcctcttctttctcctctcctccccgctgccgcggccactgccgccgccgcccataccatcggcatgtcggccgacaaatcgcagctgtcgtcgccgccgcagctgtagcagttaacgccgccggcctccaggaggagatggcgctctgcgtcgtctcttcgtcccgtctccccctgtggtcgtgggtggtgcgagagtacacgatgggtggctctcgcctcggggggaccacagggggagggggtaatttattattcgtattactgtaattttgtatcgcttaatttgtttagagccgcacgcttgacaacgccttgtatagccttatttatcccgatgacttttttctccgtacaagaaatggacgtcacttgagcagacacagtttcatcgaccacgacagtctcataatctgactacctctgacccgccaacgagaaaaccgaaaagtaaaagatgaccgcgccctcggagtccttttttccttttcaatcatgaaagcaagaggcagccgagagaatgccagtaagagacgaccatcgcagacacagtacgatactcatcttagaacgaaccagcgaataaccatcacacgtacagcagaatctcatgaactagtcaaccaacgtcataaaatcttcacacaatcgtttttgcgaacttttaggaaccagcaagtcaacaaaagactaacaaagaaaaaccatcttggaattaaaaaaagtagcatcgttaccttatgaaccagcagcattcagtatatacaccagatataatatatttgttaatgtatcctctctttctcctgatgtaattttgtttttgtaaattcaattgttgaaagtctctccctgggggaattgcatatcttattgatgaagaagaaatccctgccatatgtgttgtcaaactatcattatttctctatatgggtattttttttctaagaagcaaaagactagcagcagccaaaataaacctgatgaaatctttaactgagcccccggtggtctgtgtgtatgtttctgttggtggttggttgtctggacccgggtgggttgttcggaaacggcgggatgggaaacggttgtaaacagcgtcgcagtatacgtgacttttgatctaaacggacgtcgctaggctgacagtttacgagttgtgaaacaagatggtcaggaacaaaagcggggttttccctggtaggatttcctgtggaaacaataaccggatgttattgtggctggtacataagctggttctgggtgcaagcgcagtttactgcactaggttcggcgttagcttttgcttgggaacgctatggctataacgggaaagaaccagtttggcagcattccattgtggggggggggtacttatagcgtgtataattttgacgttgaattacagagtcgagggaatggctaatgttcatgtaaagaccggtgatgataaaaccgttagtgctaacctgaaaacggtttggtcgttttttgatggtaaaaatgataccgacgtgtgtagtgtggaggggacgaagaattacacgctagcaacgccgccgattcacggtgtgtgtaattgtagtcatacaggattgacgttttgcaacgtaacgcaaggcaacgaaggatcttatgatttaaagcggagagttgataacggtcctgaacaagtggatacttggtttcttattgtaactaagtaacgttgataattcaataaataaacgtcagtgcttttgtgttgcgcatatggtggattgacagtttggttttgtccgttgacctagttagatttcctgtgtggaacaatgaccggacgtacctggactggtacatacgcagggttgcacgtggttatcggtcactggactcggttttgctgtagctgtggttcatcttgaagatggctcccaaagctgctaagaaccggtccagtcacattccttggtggggggggggtactaataacgtgcttaatattggggtttaatgatggaatccagggtatggatatgaagaaactgaataccacgcagggtggaaatcttactatagttgatgatagcggccggttttccactgaatggaaaagatgggataacgatggagggtctctatgcaatgtgactagtaatggtacaacggtcgttaataccacagtctgtgtttcaagttgttcgcatacgtcgcttgtgctttgcaatatgacgcagcagactgattcgttgtacggagtgggtcatcggttgaatgacgaagaagatggtgaaatgtggagagtttcggtttcttaataatcccatacgacatgtgttcatttatatctgaattttaggatgatgactatagtataactctggggaacaaatatcatacgttaatcactttaagttacgccgttaggaaaagaaaatcagtccgaatgaagcatagtcagccgaatgatacagcaatagcttgtttacaacgtgttcttttttacattatgaacgtgccttgctttttatacacacatggagacagaggtccttcagcccttgtcacgacaactccctttttctaaaccgtatgtgctccaaaccgcatctcctcatcgtcacgtgaaataccatgggaccccttttcgtcacacacgtctttccgcttactcaacgcgtcagcccgcgctcggcagagctaccatataaaaacgcaggggtttagcggctttcccagatcgctgctgccccggcgttctccagaagccccggcgggcgaatcggccggctggtcggtcggcgctcggacggatggggagaacggcggtgacttagccgcccgtggccgggagaagacggaggagccgagatgacaacagcagtcgtggaagggtcgccaagccccggtccttctcttctgtctggtcgaatctcgttttcttttttcaaccgctctttttgtcacctttttatgtgagtttctcttccgcgtctcccggccgtaccatccacccatgcagcatgcacgcgtgtatgtatgcatgcatcgtctctcctccgtcccgactaccatcagcagcaccactaccgccacccccagcgccaccaccgctgccgtcgccaccgcgttatccgttcctcgtaggctggtcctggggaacgggtcggcggccggtcggcttctgttttattattttttttttattttttatcttctcctttccttaatctcggattatcatttccctctcctacctaccacgaatcgcagatgataaacaagagggtaaaaagaaaaaagctacagacatttgggtacctcagctttccgataactcgaagaattcaaagtcgacgattcccaacaagagaaaacagaacaaaaacaaggtcatttttatttatcctcatcgtcaacaacaactaccgacaacaacgaaacaccaccaagaatgtcaatccgcaagggtgttcctgccccctcgacgcgcctgtcgcgatcctcatggcgaggaccgcgatctccgtataggtagatgaaattatcccgtgtccggtcctgattccccgcatgccctgcacatcctgacgcgtcggtcagcagccaaacaatcataggaaatgaaccagaagaacaaaaagatcatctctctcggtgtatagcaacaccaacaacaaccgcatcgcaacatcttcatccgcaagacggaaagaaaacaacaataatgagaatgaaatcaccacaaccaagccagatttcacgtccatgagtttttattatattattatcaaaacgaaaaacagaaaaactgtcatagataaatataaaaaaaaatagaaaccacaaacgactactagtactccaatcttagatgtatatgctcctagataagatttagtattaccataatcatcgaagaatgaaagacgacgatgattccttaccgctcctgccacccggtctgtatgtagagagagaagagagaaaacggtgaatccaagatccccgggtcggcgtcggcatgccgctgatcgcagtggccccacctcggcatgccggcgccgggcgaggaattgctcatgaaaaaagtatctttctgtaaaaaaagaaaacaatacatgattaaccgaaaagaaaccaacaaaaagaacccgagatcagtcgatttcgatcattacgataaacacatggaagatttcttgaaaaaagaaaagagaaagagaccaccttcccggcggcggacacgctcctctccgtcgccgttctgcaccatgattcgatcaataacaacatcatcatcggagaccatcttttaatcaatcagcgttgcagtagtcgactccctggacacgaaggagtcatccatttttatcctcgcacttcttcgctctcaaagccgcctttaaagttgaaatgaaaggatggaaacatggaatacagttttaattgcacgtatcaccattttactacaaaaagaaaaaaaaacaacttacacatagtattaccttaggtttacggataagtagagtgtaggcgtttttgaaacagttcagccaatgcaatcttgtctcggcataatcactctttctgcatataatagtagtagtagatttattcacatcaacacagcgaaaaactccagcatcaaagtacacctagagacagcccttaaaatatagtttgcagcttttagatgtacttacaccaaagaagattaccgtccttacgagaaaacagatactcggatataggaatcaagacagctctgcactgaaaacacactctcctgtcacgacaccgcgccacaccagaggcgtacgcgtgacttcatcgcaacgatccatcgtgatgtccctcgcagaacctaaaaagaccaaaaaaaaatcttggaccacagttgtcgattcttgaagacaatattctcgtgagaactttgagattcgcacttgaaacctcttaggatccacaaaaacaacaacctctgtatggaaaatgcgctattttatctcagcttttctcccaaacctcggtttcttcctattatgttttccctagtatatttgcctccttataagaaaagaagcacaagctcggtcgcacggattattccttctgctaatctattattttgttccttttttttttctttgccttcacccctttcactccctgtagcaacacagagtagtagacacaataaatgagaagtttgcatgcattttttgccgtgtccgtggtctgtgatagcgtgtggagtgctcgggatgggtggacgtggggacgtattcctgaggttacaaagatacgcggagacgtcgtggcgaggggatgggtttattggatatcggtgaagcagcgtggcggcgaaagacgcgatccctgggctggtagatccccctaccccgtctaccagggacgtttatccttgggacatgtaaatgtctcggccggcatccacgcgccacgttcaccgcgtcgtgcccagcgccatgtgcgggtcgtttcggcgtgaagttggacggcgtagtttcggggattgtgaaccgtggctgagggtgtagaagggacaggaaagagcgtgtgatctggccgagccgtggcatgtgggtgcgatgcggtggatgtggtgggctggggtggttttgggcgtggagatgtggagatgggggtgatccggatgcgtggcaataggcctcgagcttgggcttctcccgcggatggtcgttctaactgtacacggcggccgtggcctccgagtaaaaaaaccaggtgctgacgccagacagagacgccgtcctcggaatcgtgtgcgcgaaagcctgttccgcggcagcgtacgacgttccaatcagcgaggccgtcgcgttggcgcgccaacagtaaggttacgacaggttggcggcccatggttccgaaccgtccccacatgcaccagcagtcggcgtcgaagtcgcttgcgctgtcggcccagtcgccaccgccgcggcggatttctgcgcgggggacggggtagccgagcgctgcgccctcgcctatgttgtgaagtagattggtgagttgatgttgattctctgtgcaaaaatgagcgctttcctgtgggttggcgttggggtatgcgtgtagttggggttgtgtttgagcgtagaggtgttggcgggcctgtgcgcaagcagcgtagtccgcggcgtcgagctccatctgcgtgcggtgttgtttgtcggcgtgtttgtccgaaggttggacatgcggttgtgtggtgctgtggtgtaagggtaacgtgtgttggtgctctgggtgaagcggcgtggtgtgggtgctgtttgtgtctgtggctggcatgattgtgcggcatgtgtgtgttgtagtgggtggaggttaaataggcgagctgcgtgtgcgtgccgtctgtgtttcccgtgtccgccgcgaaaggcccccgtccccgccgcaaacgcccccggccccgcaacgccccgtccctgccgcaggaggcccccgtccccagcgccaaagctccccgtccccactactgtgcccgccgcaaaagcccgcaagtccccgccgcaaaaggcccccgtggccgtccacgcacacccccccgtccccgcacaccccccgtccccggcgcaacccccgtccccgtccccagcgtaactcccgttaccggcgccggcgcccagcacgcccgaaaacaccgccgtcgccgccccgaaaagcgaagcgccgcgcaaaagctgcgtagaaacgccgcacaaacaccgtagaaacacccgccgccaacccccgagcgcccgcaacaccccgtccccggcgccggtccgcggaaaaaaaaaaaaaaacaccgcgggacgccacgcaccggcagtgcgcacaaagcgccggacacagcacgccgcaaacgcgatgaggacgccgccgtgcttacttatgtcccgcaacgcttcctcaaccctgtcccgtgccggactggcggaacgaaaagtgctgtggagccacacgcaacggcagcgcgcagaaagcgccgtggacaacacgtcgcagaagcggcggagcgctgacggcccgcaacaccccctgagccctgtcccggcaccggcggcgatcggggtgtgtcgggggcgcggctgggtgggtgtgtgccgggtgtggcgggtgtgtcagggtgtgccgcgggtgtgtcgcgggcgtgtgccgggtgtgtcagggtgtgtcgcgggcgtgtgccgggtgcggtcgcacgttttccccggggacttcctcttttctgcgtcttgtctcttcgtgtgtccccagggacccgcgctgccgtcccctggggactttttcctcttttccccggggaatcaaacagacacagacgcgcgtctgcttttcgccgtgcgcgccgcacgtcgcttttattcgccgtccgcgaccgccgtccccaccgcaccacacgcaactattcgccgtcgccgtccacacacgcaactccaaatttcacccccccccgctaaaaacacccccccgcccctcggggacccagcacacggcccgccgtcgctgtcattaagcagccaggtcacctcctccgctccgcggtccgccggtctcgacggaccgcgccgccgtcggcaacacggaaaacagcacgccagcccgagccgctaaggccgcatgcccctgccgcccaactgaacacgcataccccgctcaactgcgttttgccacccctgtcagtgctctcgctcgagcaccaccccgcatctcccaacctttttccaataaacgaaaccgacatgacacacgtaatgggtactcgtggctagatttattgaaataaaccgcgatcccgggcgtctcagcacacgaaaaaccgcatccacatcatagacaagttacagtccacagtcacatacacgataaacaataccaacagggtaatgtttatggagtaaaacactattgtccaggccacatgcgtgtatgacttccgcaccatcccgtactgcatgttccacatgtacgcgctagacgtgtaatccactcgcagttcggggacgcaacgcagccagatcacatccccttgcagtaccagacgcagggctagttctagagcggccgccacggcgatatcggatccagacatgataagatacattgatgagtttggacaaaccacaactagaatgcagtgaaaaaaatgctttatttgtgaaatttgtgatgctattgctttatttgtaaccattataagctgcaataaacaagttaaagcggggtttgaacagggtttcgctcaggtttgcctgtgtcatggatgcagcctccagaatacttactggaaactattgtaacccgcctgaagttaaaaagaacaacgcccggcagtgccaggcgttgaaaagattagcgaccggagattggcgggacgaatacgacgcccatatcccacggctgttcaatccaggtatcttgcgggatatcaacaacatagtcatcaaccagcggacgaccagccggttttgcgaagatggtgacaaagtgcgcttttggatacatttcacgaatcgcaaccgcagtaccaccggtatccaccaggtcatcaataacgatgaagccttcgccatcgccttctgcgcgtttcagcactttaagctcgcgctggttgtcgtgatcgtagctggaaatacaaacggtatcgacatgacgaatacccagttcacgcgccagtaacgcacccggtaccagaccgccacggcttacggcaataatgcctttccattgttcagaaggcatcagtcggcttgcgagtttacgtgcatggatctgcaacatgtcccaggtgacgatgtatttttcgctcatgtgaagtgtcccagcctgtttatctacggcttaaaaagtgttcgaggggaaaataggttgcgcgagattatagagatccgcgtcaccttaatatgcgaagtggacctgggaccgcgccgccccgactgcatctgcgtgttcgaattcgccaatgacaagacgctgggcggggtttgtgtcatcatagaactaaagacatgcaaatatatttcttccggggacaccgccagcaaacgcgagcaacgggccacggggatgaagcagctgcgccactccctgaagctcctgcagaagcttcgaattcgagctcccgggtaccatggcatgcatcgatagatcgcagccttaattaaggatgcatgtttaaac

SEQ ID NO: 6 - DNA, 226889 bp, Human cytomegalovirus
ggcgatgaagagccagagtatgggaagcatgaagcttagcaaacagaggatggctaaccgtcgttgcatgttccaggccatgagccaggctaggcccgtacaccagacgcagagcatggatgacaggacataggcctggattaccacggtgcgatcgaaacacagcccgatggtggacacggatatcgtagtgagggtggtatataccatgaccagcatcagggtcccgggtcggcgctgacgttccagccagtacgcgtggcaacgcagagcacagggtagcagtgtgctccagaagggcagtgtatcgcgcaggtagggggtcgtcacgcgccacggtatgagcatgaaaaggatggtagtggctatggtggcgctggtctggaacacgacggtgccgtagagacgtaccatccagagaaagtgttgaacgctccgcagggtgtcttcatctttggtgattacggtgactcgacggatcggcggtggtgacggcggcgacacgggtgggggtttctctttcttatggccgagtggctcgccttggtgaaactggatctgtaccatgacgggtgctagacgaacagtcgtcggggcttcaggtacctggcaagttttatagagaaagggggacgatgggtggtggctacgagccaccgccaccttcgcaatacgaggatctgaaggcggcaaagacggtcgtccagggcaggcgccagaggttgggactgagcacgatcagcgtgattttaaacatggtcaccagtcctacgtagattagcagcgagccgcgtaacgtctgagcagccggcagttcgtcgcggatgtaacgcgtgccgtagaaagtcacggtcatcataaggaagacgatggcgccgtagccgtagagtagaatacgctgatgatggaacacggtctggtcgccgataacccagagcgtgatgaaaaaaacgctggtgagcacccgtgagcatatgagctcccaacgcttagcgcgaaagctgtccccaaccatgacagcgccggtgcaagctatccacagcgtgaggaccagtgtgtagtcgatgaggatggcgggcaggtcggagcaccaggtgtagaaaaccgtggtaacggagaggaggcctacgtagcccatggtcaataccacgtcgtcggggtgcctttcgccctgtatcaagaccaaacaccagagaagggagggggcaaaaaccagcagcagaggggaagattcatgttgacatatgttgtgggaatcggggatacccagccaaatcattccgcagaaagccgtactgatggcgatgtgaaagaccactagggcgtagacccggacgaggacagcaaaacggcgcagccacataaggccgtggtgcagctgcaggagggaagcccattgcggcgaatgtagcgacggcagcggcgggtccatgaggcgggtgatgcgcccgagtgaacgggtgagcgtctcggtggagtcttcttataaaccagcgggtctcaagcaaccctgctctggaacgtcgcggtggtgctgttgaggatgacgctgagcgtgccgttgtcaacccggtaatgatgataggtgcccagcttggccaggtagctgaacatttggtcccagcgtgccgaccacaccacgggcgtgagcatcaggagtgtggtgtgatagatgagtgtctcggtggcgtaaagtaccagcgagctgcggatgatgtggctcacgggcattttggtggcgatgtagcgcacgtcttggaaaaggacagccaggatgcagcccacgaacacggtgtagagacacagcagagtcttatgcaaccaggtgtaagtagaagccaggacgctgaccatcaccgtcaaaagtgtggaggtgaaaagcgcgtcacgccacacagagctgagacggtgttcccaagccacgccgttgcaggccacgaacaacgtccacgttaggatgaggctggaaacgccgatgggcgctgtggcgcacaggttgagcccggcggtggtgaacgagagaagcgccacatacagcgcaaacaccaggccgttgctggggtgtctgtggtcggtgagctccagcgcgcccagaaccaacaccggtgtgcagctaagcaatagcggcgagggatcgtcgctgcactcgtagcccagtgaggggtaacccagccaaaccagcgcgctaatgagtacgctgaaagcggtttccagcgtcagcaatccgtagacacgcatgacgatcgcggtccgacgtagccaacacaccgcatcttcggaagctgtggacgctgtttccgaataccgggaggagatcgtgcttccctcttccaaggatcggaaagtagcgtccgtcgtttccgcggacgcggcttccctggtacgctccgtttccgacgacgcggtttcccgctgcgtggaaactgtctccatgtcgggaccgcagcgcccggcggcgtatccgcaaggtctcgaagctacagcttgtcagaggaaaagtaggtttgcaaaaaggtgcgcagggtcatgattctcagcaccatcagcagagtgaaaaccaggctgagaaacaccttgacggccgccaaaagcgcgcgttccagcggcgtctcgtagcgtacagccagggccgcttcgtggaaatgcgagacggctagacaggtaatgagcacgctgaaggacaagacgatcttaaagcaccaggaccaaccacgcctcaagatgaccaccacgattgccgtgaaggtcaacgtgatcaaagcatggacgaccacgatctgacggcggacggtacgttcgggagccaacaacgctacgccggtgcagctgagaaaggccagtaaggtgaacaacgcggccgagacgaccaacgtaccgtccaggcagagacatatcacgatcaacggcggcacgtgaagcagcgtgtaaaagagcagaacgccgatattgctgggatgcgatgtttcgtaacagtgaatgaagatcaccgacgtgacgggtatgacaaagacgaggctgggcgaggactccgtgagacacagacgggaatggtgaaaccacgtcgcgggcgccgcgtagcagaaggcgctcaacaacgcggtcaagccggccagctgccaacccacggcgccataggtgtgcagcgccacgcggcaacagtcgacccaagccagactgcgggtcgccagccgggtctcttggatcccggggggcacgtagatgaccgtgccatcggtgggtgcttgaaaccctttttctcttctcatggtgcgctgcgttctctggaaacggctgctctgtccgaaaaccagttccgaacgaaaatctagggcgagagggtggacaacggcgtcgacgacgaagcatgggacaggtcgttcggcgttaacgtcatcgcgtcggacgacggtagttctaagagacgtagatcgctcagcaggtcctgacagttgcggattcgcaagatcagaaaaaaaagggaaatgaacgtaataaagagctgtagcgacgtatgcgccacatcgcgtggcataagaacgtgacggacgaaaaggacctgctgcgaaaagtggccggcgaagataaggcccaccgtgctgtagaagcccaaaagcagccgcaggggccaagtccagggccgcgtgaagacgatgagaacgttagccagaaagaccacgacccagacgccgttgatgagggtaaattgatcggacagggtgcagttgtcgcgacagatgaagactacttccgcgcagagcaaggtgatgaccaacgtgagcacaaacgacgtcaacacctcgcggggctcctggcaggcacacgtgacacctagcgccgggatgtgcgccaggaggccggcgagtaatagcaccagctgtcggaacggacgacggcagcgcgggtgccggtttcgctgagcgagaaccggtcgctcatagcggaaatacacgaagagcgcggaggccacaggcaccaggaggagcacctcgggcgcccagacaacgtgacaaggaaagcccggacgcgacttaagagtcgctgtagggaagaccagagagaagctacccaagacggccaccgccgcggagatttgaaacaggagcaagccggcgattcggacgacaacctcgaagcgatgcacccagcccagcacggccaccacggccgcttcatcatagtcgtcgttgttgccgctgtcgaacagccgccgaaacacgatctgtcgctgggtcgcggtgggaaagcgcagacccatgacagccggaggctatatgaccgtgcgtctaaggcgcgagatccgtggggggacttttagatgtttgggcggcccgcggttctaacaggcttgattggtggagacggccggcgcggcgggtgggggaaacgacgagtttttccgttacgccatggttcgcgtgaggtttctctgtacctcccgcaaaaggtcacagcccgaaatggaggccgcgttggtggccccggtggcgcgtgacgataaccaggtcatccaagcgatgagtttgtctaatgagtcctcggtggtgaagaggataagaatgagcaggtacaggtacaccaggttctcatagagacacaaggtgagcaggtcggcctcggaccacgcgatctcaaacaggcgcgtggtgtcaaagaccgtgacgaccagcatgaagctgagcgccatggcgtaatagcccaaaaaaagtttgtgccctaacggtacgggctgcaggtaaagtgcgatcaagaacgcgataacgccgatcacaaacagcgtgatgatgacctgccatcgacggtgattatgggcggctagacccgtgacgcagctgcagaggctaaaaagcacgcaagccaagaggcccgagaaggtcaccagcgtagaggaggagcaggcgctggccacgatcaccgaaagcgtcgtgagcacgctgtaaatggtgagcaggcccgggctcggcggcgacgtgaacgatccctcgtcgcgtttgccgtgcagcagagctagacagatggtgggcaccaccaaactcaaaggcggcataaagccagtgcaacagagaaagacggtgcttttgagatgcggaaaagccagcaccaggcccagacagagcaagaaggtgcaagtgccctgcacggccacggtgctgtacacccgcatacaaagcaaaaagcgacgtacgtcgttcgtcgagacggaggaaatcataatgactccgcgcgagggtcgcgggggtgggggcgcccaggccgtcccggtggcctctgagttcggagacatgacggcggtggcgatcaaaaggcgcgtatgagaaaccgtttatagagtgtaatagaatcaccgtcatccccacacggcgttcccccataaagtcacgtcacactcgagtaagcgtgaaaaagctttattgttgaataaaaaacacaagtacaacaccgagttgcggtgtcctgtctgtctactgggtgggggaggttcatcgtctgtctctggaaggaaggtggggaacgttaaagcgagcaggagcgtgtcatctcccccatctttttataacaagctgaggagactcacgccgtcgatgcgtccgccgtgtttctcggcgtactgctgcacccagacgtggccgctaaagatggcgacgctcatgtttaggagactcatgacgatggtgtacaacacgacgctgacacagacgctgtttttagacaacgttccacgctggtagatgagatccagggtctcgtaaataagcacggccgaagcggcggtcaccaccaggacgtagagtccgctgtagatcttgctgacccacagcacgggcgaaaagtaaagcaataggtaaaagacgatgacggaccagccgtagccaatcccgatgactttccagcgcgtgggattgttgccggccaggtaggtaagaccgctgcagagaacgaaaaagaccatcaccagggcaaacgacagaccgatgacgcgcctttctccgcaaaagcccgtgcacacggtgatgccggtgttgatcagcaagcacgccaccgtgagatgagcaaaattggtggtgtgtgggcgaaactcggcgaaaccgcgtagcatagccagcgtggacacgggtacgatggaggatagggctggcactatgccgttggcgcactgtccctgcacatcggggaaggcgagccaagccagcaagcagaccgtgagggtacaagccagctgccacacgagcccgtgatagacctccatgagcagcttaaagcgtttcaaccattggaagagctgctgttcggccaccagcgcgtggctgcgatggagcggcacgatggtgaccgtcggcgactcatggtgttcggaaaccgaggcggtgtcgcccatgctgccgcttacgaccgctgtcggtctaaggtaggcgtcgatgaaacagtccgtcttatcagcacccggttaccgcggatttgattgacgtcacgagtgtggtcaaaccgtggcggcaccctgtatccgacccgtcgtcatgggctccacaaccagagcctcagaagatggtacatgccgatgaataaagccacattttcgacatagaggcgtagcgagggctgaaaactctccgggaaagaactctgacaggtgatcagggacagatcgtgaattagcatcagcgtcaccgtcaacagcgtcgtcgcgtgtaaaccgagaaagaacggggccgcggcccgcagcagccaaagtcccagcgccgtagcgcagagcagagacaggaccgacggtagccacagccgccggagagacgcgccaggatcgcaacccaaaagcgaggcccccaggcagccgagatctaccgccagggcgagaagagccgcgctgagaaaggcctgcggcgacggctggcacatcagcaaggtcagaaaggctagcgcgtgcggcaggcagtaagccaacaggagtgggagtttgcggggacaacggtcgagcgacggaccgcgtagcagcaggaacaggcaaccgacgggcacgacgaggctgagatgagaaagcggcggtgggtcgtcgtcccgtccccgttcgcatagctcggccaccggtggcggcatgagccaccagctgagcacgctgagggcgacggtggcggtaagctggaaggcgacgaggacggaggcgcgcagccataccgccagcctctctaggtaggggactacctcctcgacggtccattctagcgggacgacatgaagcatggcgacaagcgcggctgctctgaaaacgggcacggttttataggcattaggacgtccccgtcgtactggcggctgtcaaagtcccgttgtccaaagacgcgccgtccgaaagactaatccaacggggacccgagagcatgagcaacaacgtgagaaagatggccatgctgtccaggtagagacagacggcatgacggatgcactggttaggtgggcagaaaaagatgaccatgagactatcgtaggccagaatacccaaaaagaagctgatggagaaggcgcacaacgtcaccactatcttctgcagccagtcggcgtcgcttagcagagcgagcgtgaggaacgaaagcagcatcaccacgtagacgcagctgatgcatttccaacgacgtcggtcacggccacctagaaacgccagccccgtaaaggagataaacaacgccagggtcatcacgtaggaacctactagtacgcggctttcagagcacatttggaagatggccgccgtcaggctgttggccaacagatagatgaaaagcaccgtggcgttactagggtgttcgttgcccaacgtgtacgtgatgaacatgcagacgatgggcacgagcacggtgagaaagaagctgtagttctcgacacaaaagttgcggttttgtgggaaccccaaccaaaaaacgcttcccaagccgaagctgaaagccagctgaaagatgaagatggcgtacacgcgcagccatacggtgaactttttgaaccactcgagagcctccatgcgggagagcagcagcgcgttagcctcctgcgcctgcatggtggcgacggtctcggcacaaagccgctgcggcgcacctacccttctcttatacacaagcgagcgagtggggcacggtgacgtggtcacgccgcggacacgtcgattaggagacgaactggggcgacgccgctgctgtggcagcgaccgtcgcagcgaccgtcgtctgagcagtgtgggtgctgccgggctcggagggcatgaagtagagcacggagacaaagaggtacatgaggtccatgtacaagcagagcgcgcccgggatataactctcatactcgatgtcgtgcaggatgtcctgcgtatcgcacaccaccgaggtcacgatgacggccaaaccggctatcatcaccaggatctcacttaccgcctcgggaaagagagaaaatacggcgaacagtaagagaatcagcgtggatgcacccgtcaatagggaacgctgtaattccacgtcgcgggcaaaaagataggtagcgagcgtgaggaaacaaaatagcgtcactgtggccaccatggcgtaaatgaccgaacgatgactaaaatggaagcctgacgccgtgacagccacgctggtaagcaacgtgtacgtcagtaagatccatacgtttttgggaaagttgggctcggcccaacgcaacagacctaggcacacgatggagatcattaagcaagacagcgtcagacgcacgctggaaaagagctgctccagccggtgcggcaacaccagccagcaaaaggcgcagacgctcataaggatgaggcattgcacccagataaggatgtagatgcgcagcaggaagaccgaccgggctatctggacctgaccgcggagcgacatggcggcaacgccggcggttatcgccgagattcgtctaaatacacaaagcgaactagaaaacgcacacacgtgatttgcaaaaagaaagcagctgccggcttattattttattaaaaatttatctgtgcagaatcataagtttatgatgaataaaaacggggaaagggaatctgcttttagggacccgggtctggtccgtcgtctcccatctggtcgggttcggggatggggacctgtttcagcgtgtgtccgcgggcgtgcatggcttttgctcgccggccgcgctgtaaccaggcctctttctctgtggtcggcgagtcttccgacgggtagggagtctgggagtccatcgcttcaggcccaccgctcgttccctcgaccgtcgtgtcgtcctcgttttcgctattacacggggtttctggagtatcgcctatacggttggcgattctccgggggcggccgctctcgtcctcgtcgctgctatcgccgcccggtaattcgacgccgcattcgttgtacggagcgcggcacatgggcggcggaaagaacttgggcatgcgaaagcagcgttgtccatccacggtctgcgtggtttcatcgttatcctcccataatcccccctgtagcgccggcagcgtttcgacgctgtgagaggggaaggcccagttctggttgtcttgcagcgcgcccgtgggcagtaggtccgtgcggccccaggcgctgctgttgttgggtaccttgtcagtgccgcgagtaggtcgcagaaaccagtccagagcgctctctagctgcgagcgtgtaatggtgcccagtgcgccgtgccagcgcagcacgtctcttttcagcgtgtggtgacagacgggcagctcctccagccgacactcgccgcgcaatccgcggtcgaagcggcagagaccacgcagtttaagcaggccgcacttgagaaacatgtgaaaattatcggcaatgcgatacaggtccgagtcctcgatcttgtgtaggtagaccacgccaaacttgtcgagcagtaccaggccgctgggcacaaaaggcccgtaggccaggtaatagcccacgaggccgacgacgtaccactcgcagcacaagcgttgacgaataaagttcagaagatcgcgaaagtccgcggccggcatgtggtcaaaaggccggcaggcgcgcaggccctcgatggagcccagcatgagcaacggctccacctcggtgcgacccggcgtgcggatgaccaggttgagaccgctcatttcgcgtgccgtcttggccacggccgcagcgtcagtggggtcggtgcagaggaatttttgcacatgatagcgcggttcggtggtggcgaacggcgtttgtgggtgccgatacacatattcgcaccagagtaggccgttcttggaaaaggctttgatatcactggccacctcgtagagcccgtcggtctcccagtcgtagacgtagacggtgccgtaatgacttagcatgagcacgcagggcagttcctgcgcctgctttgtgtttcgtgttagatcgctgtcgggtggacgcacggctagtacaccgacggcttccagggtgtcatcgcagcagagatagtcggcggccagagaacgtgcgtaaatctgcgggatggcggcctgttcgcgcatcactaggaaccagttggcggggttgcgcagtgctacggtggttccttggtggcgctgcacgtaggttctcagcgccggaggatcgtactggcgcagatagaggccttgcagcatcgataacgtcttttgaaagacggtgtttctaaattggaaaacgccgtagtcgcagcggatagcatcttcgcagcgctcgtcgcgctgtcggagataggtgccccaggcttcggcggcggctttggtgagtagggacatgccggcggagccgtctcgacagcgagtcggataaagcgcgctgcgcgaaagcttaatataggagcagcgtcagacgaatcgcggctggtggcccggggggtgggacgcgccgcctacacaaagtgttcccgaaaatcgaaactcttgacccactccggagacaaatccgtattcagattgatgcgtcgcgcttctacttcggcttccgaaacctcggcctccgtccggtaggcgttaacgatacgctgacccaggtgccaacgctctttctctgccaaacgccgttgctcaaaccattcgtctacgtccttgaggtcaaagacagtgtcttcctcaaggtcaaagcctaggtcttcccactcgtcgtcatcgctctcgtggccggcggccatacgcgcggcaactgcgtcttcccctcctctttcaacgttgggtaccacgttgttttcttcgggttccatgggttctgcgccactgtcgtcatcgtcctctccctgctcctcatcgtccgccaaggcgtcgtggatcacctccaggttctgattgtcgggtacgacgtggttatcttcgtcgtcgtcgcgtggcatgggcggcggccgacggcggacaaccggcatggcgcggccgtcgtttccttcgtcttcctcttccccgtctcccagggaacgcggtcgacggcgttccgcgaagtcgccgcggaccacgcgcgcctgccagatggtaaacgcgtcccaaccgtcccagttattgagcatttcggcgcggaaacggtcgcctcgacagagccagcgaaattgccgcgcgtagtcgcggtctacgccgctgtcgaacatggtaaagtgcagacgcgccgcctcgcccatgtgtacgcagcctccgttgcgttccagcctggccgcgcgccgcagaccgtgttcgtagcggcgacgcacgtacaccttcatgaggccggcgcgaaaaagttcctctaggctgtcggccagacggtagatttcaccggcaagacgctgcaggggcggcgagcggtccaggtgcgacttgacgatcaccacgtaaaaacgacagaaacggtcgaagatgatgaggaatgacgtgtcaaagaaaccaccggcgcggtaggagcccacggcgcccagcaggtaccagcggcaacgcagttgcagcgtgacgtacatttcgcactcggccaagcgggcggctggcgctacctcgaagggccagcagtccgtcaagcagccgaaactggtcaggagtttcaacgttttggcatggcgcccaggtgtatgaaagttcacgtcgcgtccgtggtgttcgccaacgcaggcggccaacgcgtcggcgtcatgaccgtgacgcagcagcatcgctaccacgtcgtgcggtacccgcgtagcaaacggcgtctgtggctgacggtatacggcttcggtgtacatcataccgtaacgcgccagctcgtccagatgacgcgcgcacagcagcagaatctcttgcgagggttcgtagatgtagaggcgcgtaccgccacccatgcagagcaccagctccgtctcttcgtagtgatcttccaccatgatcacgcacttgcctagcacgataaggcgttcggggcaacaaatcacgtcgtccagcagctggtcgcgtagctccggcatggtgctgccgggccgtacctgcaggaaccagttgtgcggaatgccgagcgacagcacctggtcgacgtggttacggacccagtcgcgaagcacgtcggcgctgtactggcactcaaagatgccctgaaagtcgcccatgacccgcagaaaagtttcgtagcgcgtgtggcaatagaggaattcatcgtttcgcgtaaacgtgggagctccgtcttcccaacgtgtacgccacatgtcaaaagaggccgccagctagacaccccagaaaagaagcagagaaagagacttctttgtgcgacacgttttattccgcgttctccgctcgacgttcaaatctggatgtactcgcgcacacccgtcaggctctttaagggaaaagggtccgagtacgtcactaaccgcgactgatgcaccagggcggtaatcacccgctccgcgccctcgcgcgtcgacgaacgcgtcgtcaccaggcagtgcagccgcgggcccgtatcgtcctgatgaccagcggcctcgcgctcggctgcttccacaccgacaatgtcgggatccaacacgtagctctgcgagttggtatcgtagcggtgtagcaccaacgtgttggggtccagacgctcccacgcgccctcgtgcgggtcaaaacgctccgttaaacagagccagtcatactgctgctgcagaatacgccgctcgcgctcgcgtcgctcatcgggcaacgcggcgtcttcgttgaagagaatgtcccgcttgtggtctacggcacgctcgtggtgatgcgggcacagatgacggtgttccatacgcgtctgacgttgacgctcgcgctcgaaacgccggtgtcgaaagaccattttcagcaaccccatgcggaaaaactccgtgatggtgttggcaacgcgccgcacgtagtggttggggtcgtccatctggatggcgtacacggcaccgaaccagtccaacagtaccagcacttcggccacaaaactgcgtcccggtcgcggacgtcccgtcacgcctagcacataccacggcgtggccagattagcacggacagcccaccaccaacgacggctctccacctcggtgagcgcacaaaagggccaaatgcggtgtaactgctgcaccgttttcatcagccgcataatcaccgtgccgtaacccggtgtatgcaacttcacgtcgcaacccaggattcgttcggccgtggcgtacgagccctcaggtgtggtgtcattgagaaacaaaacatgcatggtacgcgcgcccttagggtatcgtcgcggaacaggtaccgtcattctccgcagagtggtgtgaatcacgtcgcgatacgcaatctccgaacgtgacacaccgtaacgtgccagttcgtccaggttgtgcgataccaacaccatgtacttttcacgagtgtcgtaggcgtagacgcgagaaaagcgacccataaaaaccacgtacggggtagccaccatgccatcatggtgatcgcgacgtggctcgggcaacaaaataacagcgtatcccaacggcgtcagcggctcgcggcaacagatgagctttgacgccgcctgtttggcggcggtaatgatcccgtcctccgtacgtaacatcacatgccagcccttggggggacccaaggacagacagcgtccctcgttacgatgaacgtaacgcgtgatttccattggctccaggcaaaagaacagttccttaaaatctcgcaacacttgtcggtataacgccatgggatcctcggccgccacaggcagcgcggggagctccggcggcacaactgcagcgccgtcagggccagaacccgcagccggatccatcattgcgcgacactctcagccggacaaccggcgtcactgacagaagccgagccaaatacagagaaagcaacgctacaccgtcaccccgctcccaagcgccgcggaaagtgctccgatttttcaccgtcgttcgcgacgttgatttgcctcggtctgagaaccgacctagcgttcggaccggtgcgcagaaacagccggcggtccgagccactgagcggttcacagccccggccgccgatagttaccggagagacgttcgagctgcaggtacatcggcgctccccgcttcgccaccccgcgcccgccccagtttatactctccgacgccccttccaacgcgcctgtggagggccaatcggaccgcgggagctctccaagtggatgacagacacagccgggtgcccgaccgtgaagagccctcatccacctgaacagaccgctaaccgaaggaccccgagtcgcgtccgtcggtcccgacgtccgtcgccatctggctccctgctgttggctacctctcggatttcaaaaaagagcacgtgccgatgacggtgcacaggaaagagccaaagtgtcacagcgtctttttttatttgtattcctttcctgttttgtactcgtaaactgttgacgttgtttttacatccaaaagggcaagtaagaaacaggatgaggcatggtaggtttgggcgtggggcggccctccagcacggcggcccgggccgcccggcgggtgagcacccggcgttgcgccgtgtctatcttgtgtttcttctgtgtctttttcctatcttgttccgcgacggcctctttcatcacgttcagcatgcgttcctcgacgcccttcagggatcctggggaggagggagtcctagtgaggcttccaatgttgttttgtggattttcggtttcctcttcttggtcgtcatcgtcggacgtgtcgtcttcctcttgatcctcttcttcgtccgagtagtagacgcatagtccttggttcatcaggctgggattcatcaggttctgacggggaatccgctgctgtagacgtttaaccgcccgttccaggcgagagctcatgccgcaccagacgctgtaacgccgcacgggcccgtagcgggctgtttgttcgcgtacgtgatcgttgagctcttgccaatattgtttggcacactccagatcggaggtttgtggatagtcgggtcggatccgtggatcccaactcacatcggcggtgccggagacttcgtccagactgttacgcatagagcaccagtcgggtcggacgataaacctgtccttgcggattaaccatttataacgtagttcgtgatggcgtgtagaggcccgtacacgctccacggtcccaaagcggtcccagaagggaaagttttcgtgggggcagcgacccggcacttccagacgttcggcgtcgtccacggcgtagtgaaaacgccggccggcctggtaaattttgagcagacccactgttaacaacatatccacgctgtcagccaaccgccagatctcgcggcgagacacgtcaaaatagaaaaattcgcaggctcggtcgaccaggatcacgaaatcggcgtgaaagacgccggagggtagcgattcgcccaccacacccattatcatggtttcacagcataagcggtccacaaagaacttcaacaggttgttgaattgctccgtctccatacagatgaagggccagacgcctttgaggttctcggcctggccgcagagcagtagcggacgtgtcatctcgcccggagtgcgcagaggcacgcattcgccgcgataacgacaggtcacacgctgtagttcgctgatgctgttgtcgtgcaggcgaaggtcgcagataatatgatccggttgcgtggttagcagcggcgtgcgcatttgctcgccgtagatggcctcgcagtgcaacagcccgtgtcgcgcaaaatcgtccagactgtgcgccaggtagtaaagcaccccgcgatcgcggtctagacaccacacggtttcgtaacgtcctaacaggagcaccagacgggcctggctaggtggctcaatttcctctacatacacgaaaaagtcgtcatcgtccgagtcctcgtcctcagaagaggaccgcggcccgtgtactctgggcaacacggtggtagagaactgcaggacgcccagagactcgagcgactcttcgcagcagatgagctgaccccagggcgtttcgggcccgtcggtgacagccgcgctgccaaagatgtcctcaaactctacaaaatctagacgccatccgggtggcgctgaaatgggaaggctaatgttcatatcagcatagctacgaactaagtggcggatgtcctgccgcaagtcttggcagagaatgagctttcgtaaaccctttagggtcctccgaacaacggccccagacgcgtagcgataggactggcgcatggtgccgcggcgtggagcggcacttggcagcctattttatggagtttcttcagtgacgtggcttgttcacgtcgttcgtgggctgcggttggcagctccggtctgtaaaccacccgaaaagactgacatcgacgtcaaagactcacgtaatttggaacatgtgcgaccgaaaagtgcgtcagaatagcacgtggctttaggacataaaaagtaccgtgaggtctagacgtggtttttgtgattgacacttacaccaggtaagccaagggacggtgaaactgtatgtgaggaacctgggtgcttagacaactaacgtgtaatgctttttacaggaccgttcaacaggtgatactacctgcaaggtaatgactacatctactacaactaccactaatatcatgctacaggtgagcaacgtaacgaatcacaccttgaatagcaccgaaatttatcagttgttcgagtacactcggttcggggtatggttgatgtgcatcgtgggcacgtttctgaacgtgctggtgattaccaccatcctgtactaccgtcgtaagaaaaaatctccgagcgatacctacatctgcaacctggctgtagccgatctgttgattgtcgtcggcctgccgttttttctagaatatgccaagcatcaccccaaactcagccgagaggtggtttgttcgggactcaacgcttgtttctacatctgtctttttgccggcgtttgttttctcatcaacctgtcgatggatcgctactgcgtcattgtctggggtgtagaattgaaccgcgttcgaaataacaagcgggctacctgttgggtggtgattttttggatactggccgcgctcatggggatgccacactacctgatgtacagtcataccaataacgagtgtgttggtgaatttgctaacgagacttcaggttggttccccgtctttttgaacaccaaagtcaacatttgcggctacctggcgcccatcgtgctgatggcgtacacgtacaaccgtatggtgcggtttatcattaactacgtgggtaaatggcacatgcagacgctccacgttcttttagttgtggttgtatcttttgccagcttttggttccccttcaacctggcactatttttagaatccatccgtcttttagcgagaacgcaaaacgagactctacaaaccgttattactttctgtctatacgtcggtcagtttttagcctacgttcgtgcttgtctgaatccggggatctacatcctagtaggcactcaaatgaggaaggacatgtggacaaccctaagggtattcgcctgttgctgcgtgaagcaggagataccttaccaggacattgatattgagctacaaaaggacatacaaagaagggccaaacacaccaaacgtacccattatgacagaaaaaatgcacctatggagtccggggaggaggaatttctgttgtaattcgatcctctctcacgcgtccgccgcacatctatttttgctaattgcacgtttcttcgtggtcacgtcggctcgaagaggttggtgtgaaaacgtcatctcgccgacgtggtgaaccgctcatatagaccaaaccggacgctgcctcagtctctcggtgcgtggaccagacggcgtccatgcaccgagggcagaactggtgctaccatgacgccgacgacgacgaccgcggaactcacgacggagtttgactacgatgaagccgcgactccttgtgttttcaccgacgtgcttaatcaatcaaagccggttacgttgtttctgtacggcgttgtctttctgttcggttccatcggcaacttcttggtgatcttcaccatcacctggcgacgtcggattcaatgctccggcgatgtttactttatcaacctcgcggccgccgatttgcttttcgtttgtacactacctctgtggatgcaatacctcctagatcacaactccctagccagcgtgccgtgtacgttactcactgcctgtttctacgtggctatgtttgccagtttgtgttttatcacggagattgcactcgatcgctactacgctattgtttacatgagatatcggcctgtaaaacaggcctgccttttcagtattttttggtggatctttgccgtgatcatcgccattccacactttatggtggtgaccaaaaaaaacaatcaatgtatgaccgactacgactacttagaggtcagttacccgatcatcctcaacgtagaactcatgctcggtgctttcgtgatcccgctcagtgttatcagctactgctactaccgcatttccagaatcgttgcggtgtctcagtcgcgccacaaaggtcgcattgtacgggtacttatagcggtcgtgcttgtctttatcatcttttggctgccgtaccacctaacgctgtttgtggacacgttaaaactcctcaaatggatctccagcagctgcgagttcgaaagatcgctcaaacgtgcgctcatcttgaccgagtcgctcgccttttgtcactgttgtctcaatccgctgctgtacgtcttcgtgggcaccaagtttcggcaagaactgcactgtctgctggccgagtttcgccagcgactcttttcccgcgatgtatcctggtaccacagcatgagcttttcgcgtcggagctcgccgagccgaagagagacatcttccgacacgctgtccgacgaggtgtgtcgcgtctcacaaattataccgtaataaaaaagcgctacctcggtcttttcgtacaaaccccgtgtccgcccctcttttccccgtgcccgatatacacgatattaaacccacgaccatttccgtgcgattagcgaaccggaaaagtttatggggaaaaagacgtaggaaaggatcatgtagaaaaacatgcggtgtttccgatggtggctctacagtgggtggtggtggctcacgtttggatgtgctcggaccgtgacggtgggtttcgtcgcgcccacggtccgggcacaatcaaccgtggtccgctctgagccggctccgccgtcgaaaacccgacgagacaacaatgacacgtcttacttcagcagcacctctttccattcttccgtgtcccctgccacctcagtggaccgtcaatttcgacggcccacgtacgaccgttgggacggtcgacgttggctgcgcacccgctacgggaacgccagcgcctgcgtgacgggcacccaatggagcaccaacttttttttctctcagtgtgagcactaccctagtttcgtgaaactcaacggggtgcagcgctggacacctgttcggagacctatgggcgaggttgcctactacgggggttgttgtatggtgggcgggggtaatcgtgcgtacgtgatactcgtgagcggttacgggaccgccagctacggcaacgctttacgcgtgaattttgggcgcggcaactgcacggcgccgaaacgcacctaccctcggcgcttggaactgcacgatggccgcacagaccctagccgttgcgatccctaccaagtgtatttctacggtctgcagtgtcctgagcaactggttatcaccgcccacggcggcgtgggtatgcgccgctgtcctaccggctctcgtcccaccccgtcccggccccaccggcatgacttggagaacgagctacatggtctgtgtgtggatcttctggtgtgcgtccttttattagctctgctgctgttggagctcgttcccatggaagccgtgcgtcacccgctgcttttctggcgacgcgtggcgttatcgccgtccacttccaaggtggatcgcgccgtcaagctgtgtcttcggcgcatgctgggtctgccgccgccaccgtcagtcgcaccacctggggaaaagaaggagccaccggctcaggcggccttgtcgccgccactgaccacctggtcactaccgccgtttccgtccacgcggatacctgacagtccgccgccaccgtaccagcttcgtcacgccacgtcactagtgacggtacccacgctgctgttatatacgtcatccgacatcggtgacacagcttcagaaacaacgtgtgtggcgcacgctacttatggggaacccccggagcccgctcaatcgacggctacggttcaggaatgtgccgttcttaccgccccaaattgcggcatcgtcaacaacgacggcgcggtctctgaaggccaagaccatggagatacggttcaccatagcctggatgtggtttcccagtgtgctgctgatactggggttgttgacgcctccgagtaacggctgcactgtcgatgtcggacaaaacatgtccattcgagaacagtgccgtcttcgagacggtgcgacgttctccaagggagacatcgaaggtaacttcagtgggcccgtcgtcgtggagttggactacgaagacgtcgatattactggcgaacggcagcgacttcggtttcatctcagcggactcgggtgtcctacaaaggaaaatataagaaaagacaatgaaagcgacgtcagcggtggaattcgctgggctctatatatacaaaccggcgacaccaagtacggtattcgtaatcagcatttgagtatacggttgatgtatcctggggaaaaaaatacacaacagctgttgggttctgatttcagttgcgaacgtcaccggagaccgtccacgccgttgggaaataacgccaaagtgcctttcacgacccgcacgtcttctacatacggcgtcctcagcgcctttgtggtgtggatcggatccggcctcaatatcatctggtggaccggcatcgtgcttctggcggcggacgctctcgggcttggcgagcgttggctgaggttggcgctgtcccaccgggacaaacatcacgcatcgcgaaccgcggcgctccagtgtcaacgcgacatgttacttcggcaacgtcgacgggctcggcggctgcacgccgtttctgaaggcaaactgcaggaagagaagaaacgacagtctgctctggtctggaacgttgaggcgcgaccctttccgtccacacatcagctgattgtgctgccccctcctgtagcgtcagctcctcctgcagttccctcgcagccccccgagtattcgtctgtgtttccgcctgtataaaaataaagagacgggaggctgatcgcggccttcagcgtctcatttgtctttactctcgagtgcggtcggtgtctcgtcggtgagacgaggccgccgcccgacaagttcgatctcatgtcgctcttggagcgcgaagagagttggcgtcgcgtagtcgactactcgcacaacctgtggtgtacgtgcggtaactggcagagccacgttgagattcaggacgaggagcccaactgcgagcagccggagcccgcacactggctggaatacgtggcggtccagtggcaggcccgggttcgcgattctcacgatcgctggtgtctctgcaacgcctggcgtgatcacgccttgcgcggccgttggggtacggcgtattcctcgggttcctcggcctcttcctccggtttcgtcgcggaaagcaagttcacctggtggaaacgactgcgccacagtacccggcgctggttgtttcgccgccggcgagctcgatacactccgtctaactgtggggaaagtagcactagcagcggccagagtagcggtgacgagagtaactgcagtctacgcacccacggcgtgtacacacggggtgaacaacactaatcgataagtcgcgtgtaggcgactggctacatcaaccggatatctgcggggatttaaaaagacgacccgttgtcatccggcttagagcaaaccgtccttttatcatcttccgtcgccatggctatgtacacatccgaatccgaacgcgactggcgtcgtgtaatccacgactcgcacggcctgtggtgcgactgcggcgactggcgagagcacctctattgtgtgtacgacagccattttcagcgacgacccacgacccgagccgaacggagggccgccaattggcggcgacagatgcggcggttacaccgtctgtggtgtttttgtcaggactggaagtgtcacgcgttatacgccgagtgggacggcaaagaatccgacgacgagtcgtcggcgtcttcctcgggcgaagcgccagagcaacaggtccccgcttggaagaccgtgcgagccttctcgcgggcctaccatcaccgcattaaccggggtctgcggggcacgcccccaccgcgcaacttgccgggatacgagcacgcctccgagggctggcggttttgcagtcgacgggaacggcgagaggacgatcttcgcacgcgggctgagccggaccgcgtggtgttccagttagggggagtgccgcctcgccgtcaccgggaaacttacgtgtaagaacacggcgtgacaataaacaacatagcgtaaatccccgtgtgatgtgtgtgattgacgttcaggaaacatgtccccatcatcagcgtcacaactgacgtgggttgggtactgacgtgcaggatattacgcgagtcagagaatcgcataagaacggggtggtgagcgggttcccacaggagtttctggcacagaggcaccatgagcctcaagttccccgagagggtgggttacgagaaattgggacaccgcccgtataccaaacgcgtgcgggtgcatgacccgttgggattgacgcggtttatcatgaggcaactcatgatgtacccgctggtgttgccgttcacttttccgttttacgtgccgcggtcctagcacgtcagtggtgacgctgataattgcaacatggcccatgacgaacccgcttgggacgaacgtcaataccacgtcaaaccaccgtgacttggctgaacgttgaaacataaagccaaagcgccgtcggcacttggcttcagagcagcgcctcggggcgatgcgacggcgatgaacttagagcaactcatcaacgtccttggtctgctcgtctggattgccgctcgtgctgtcagccgcgttggtccgcatggctccggactcgtttatcgtgagcttcatgatttctacgggtatttgcagctggaccttctgggaccagtggtggcggggaatcgctcagtccggacctggagagagcaggcggaccgagccagagggaccttcgctcggcgttcaggccttaatactagccacatcttacctgtcggcagcatgtatcggggctccgacaccttatccgccggcctgtatcgttccaaagaagaggtgttcctcctcttgaaccgctgtcacgggccactgtcaacgccgaaaaacgcttgtctggctgaggttggtgtcgttaatggaacttttttgtctcgcttcaatgtcggtgattttcacggagcgtcatgggaaaacggtaccgctcccgatggagagcccggggtatgctgaaattcttcttaaaattacgtaaacgacgtcgtccagtcgttgtgccgcgattcgtacggttcatcgtctacgtcgttttgttcaccgtcgctgtgcaacgtgtgaaacaagagcgcgatgcgcaccttcggcggtatgaagaacggttacggaaaaatcacgcacggcgtcggcagtcttttccgtgacttggggcgatgggtccgagctgcggtatgggtcacggcggcgtgtgtcttactgacgaagatgccgatgtatgactaaaaacgtcccagccccagagcgatgtgtttcaataaaaaaatatgtagtatcatattatgcgtgtcctggtttttcatttctggatgtatttgttacataaaaggcggtgggatatggggatgaaacatatgtagatacgcagttttattatccgaacaaagctcgtgtgatgcgaaaaacggtactgcaggatgaaagtcccgttgggggggggggcagagagtagtcgcttttgccgctgggcatacgctatgcttgtatttgtgactatactatgtgcagtcgtgtgtcgatgttcctattgggaagggtgtgaatgtacgaggtataaagaatggtgggacgcaggaagacatcgctagacacagctgtattgtgctagccccacttagcgtcatgggtaaaacggtgataaagcgtcaaaacaccataggggggggggggcaggaggcttggtggcggtgttcattaaatgcattatgtgtatttattgttacatttgcaaatcgccgagtataccggtataatgtagcaataatcgtattatgtgtgtactatacagcgaacattacaacatcagtgtagcgtgaagcaagtgtgggaacaatgccagtgaagaatatataaaaggcagaaacatacataaatgaattgctagatacagggttctttgtgtactagcccaatcatgtcaatacaatgtgtacagaaaaaagacgcgacaacgacgggggggggggcgcgtacgattaatcttacatattacagtacaggctaccgcgtggtgttgtatatgttacgatgcggtgtgcctgtcagtgtaattggatgtatgttacttatccgtggcgttgtgatagtgttgtgaaaaataattgtcgtgagcataatgacagctgcaaaataaaaccgttttattgagcattgtaatggtagtgtgtggctacattagaaaacgtgacgcgtcgcatgtcgcggcacaatctggcagcggggtcggggtagggtacggtgggaggcatgtacacagatggaacaaaagcagaagtaacgtgagacggagcatatagcccagtatccagcggttcctgagtagcaccacccatcaactgaacgccctcatgagtaaaagtctgcgggcggcagcccttggggaccgttggcatgggacgatcaatctccaaaccacagcgtaacacggttttcttccaacgtcgttgatacacgtcgtttttacggttactccccagaacccagaaagtctcgtccaagtcgtaccaggagtcttccccagggagacgtggcggtttccaatcctcatcgtcccgtcgcaaagcacgtcccaaactggcttggggagtcaacggtggttctgtgggtcgggtgtagcgcgagtgttttcccttcatgaccgattcgtcctccttgcctttaggctttttggtctttttgtgtatcatctggccgccggcttccataaccaccgtggccaagtccagtcccagagcttgagcgtcggcgcggcgtcgagcgtcttgcaggtagtcttccacatttgcacagatggccgggtgtttggtggctagggtgaggacctcagcctcgccgcggcccggacgtaataaaaaagctaactgcccgtgcggctcgcgcgcccacagcgcggcgcgcgggtgcaggtgcagcgcgtcccagcgcggccgctcccactgctcgcggtccagctcgggcagcagccgccgcgcggcctcggcggcgggcgccgactcgcgccccagcgccagcgcgcccagcacgcccgcgcgcagaaagtgcgacagctccgccgccagcgggtacacgtgcccgtccagcgggcagtacccgaacacggcgcccagctcgtccagcaccaccaccagcatggcgcgcggcacggtccctgacgccgccggacccgccatcgccgtcggacccaccaacaccgtcggcgccgccactgctgccgccgcatccgccccgaccaccgcgtgcgcgtccgcgtttggcacgcacaccgcgttcccgccggcggaggcgccgtatggctgcggaggcacaggtacagcggaccccacggctcccgccatcgcgcacggcgcgtccccgccggcggcctccgtctccgtgccgctcgcccccgccggcaacgtcgtccccgccgtcatcgtcgtcgtccccgccgccgtccctgtcgccggccccgccggccccgccgcgcagcccagccaccgcgcgggcagcaccgcgcccagcgccagccagccgcagcacaaccgttggttcaggtgccgacgcacggccgtcagcagcgacgcggggtgcggggccgacgcgaacggttcgtactgcgccagctcctgccacgcgcccagcagcaccatcggctgcagtcgccttcccggcgtctgtagtgccaccgtcgtgcctgcccaccgccggcgcagctcccgtccgagcgccgtcgcctcctcggcgcgcagcaacgtctgtcggagcgccggctgaggcagcagcgtcgcgcgcggtgtccccacgcccagccggttgcagcggtacagccgcaccacctcgcccgcgccgtgccgaaaccactcgtccgcgtcgcgcgccgccaggatcagcgtgttgttcgccaggtcgtacacgaacacgcggaacccggcgcccagcgccaggtacagtccgtcctgcgcgcacagaccctcgggatggccggccttgtcgcccaccgtcgggtcggccgcggggtccacctcgtgcaccacggtcgccaccaacacgatccacgcgtcacgcggcgacaattgacgcaggtccgtcgcgcccacgccgttcatctggctgcgcggcgtcacccgcgcgtagaatccgtacggccgtccgagcggcagcagtgtgcccgcgtcgcgctgcgaccacttgcgcatggcgcggcccgtgctgttggccagaaacgccgcgcgccacacggcgcccatggcctggtattccagctccgtcagcgcctggcgctccacaggaatctgagacagcaacaggcgctccgggccgtgccaaaagttgctgttgttgccgctacccggaggggcgcccggcggcccgcggggttctacgcggtggacgccgtgggccggcgtcgccgaacccgcagtactcgcaccagtccccgctgttgacgtcgctgccatcggcacacaagaagaagaaggggaggaaccaacccccgaaggccctccggcaccgcggccgcgaccgaggggcggggggcgcggcgacatgccgttgcgctgggccatggccgccggacacctccgacgtcgagccgacgtccactatatagcaacacaacccgcgtccgcgaccacgccgtttacacacggggacgtctccgttgtccgtgtgctacggtcgccacgcacctggcttttataggcagcggcgtgcacggcgcttgctagcgccgccttggcgccgcgcagtctaaaaggccgtggaaaaccacccggcagcccagccacccgaaggaacacgcgcgacagccccggagtgcaaagcaaagccgcctcccgagcgcgcacccacctaggtggacggccgacatccattccgggccgtgtgctgggtccccgaggggcgggggggtgtttttagcgggggggtgaaatttggagtcttggagccgcgtgtgctgtggaggacggtgacggtggtaagagtgtgctgcggtgcggttgggacggcggcggcgaataaaagcggcgtgcggcgcgcacggcgaaaagcagacgcgcgtctgtgttgtgtgtctttgaccgcggcggaacacacgcggaaaagcgagtcccaggggacacacgacgagcgagtcccagggggggacgacgacggccagggacgcggaaacgacgcggaaaagaggaagtccccagggggacgggcggaaaagaggaagcgcctaggggaccgcgggggcaggaacagacgaagtacgccgcaacccgcgtcgaggacacacgcagaagcggccgcccaggggagggggggggggggactcgcgggccccggggcacacttgttgttccctccggccgccgacacgcaccccgaagccgcgcacaccgccgacacacccctgacacacccgcgacacacccgccacacgcccgacacacgcccgcgacacacccgaccgacacaccctgacacaccccgccaacacacccagccgcacccgccccgccaacacacccccgacacacccgacacacgcccgcgacacacccggcacacacccacccacccagccgcgcccccgacacaccccgaacggcgccggtgcgggacagggctcacggaggtttgcgggccgtgagcacgcctccctttgtacacactaccggtgcgtggcgtcccacgctatttgttcgcgagaccggactaagggaggtttgcggtgcgtcagcgcggggcggcgtttgcggcgtgtttcgaccagcgctttgtgcgcgctgcctgtgcgtgtcgtcccatggtctttgtcagcggcacggcgctggggacggggtttcaccgcgctgagggatctttctgcgggtgtgagggacggagcttttttcgcacgctgggcaccgggctgggggacggggggtgtgcgggacggcggtggggccggggcgttgcgggtacggggattacgctgggaacggggactcgcggacccgggctgagggacgggggtggcgggggtgtttgcggcgaggacgggggccttttgcggcggggacggggactcgcgggaccggcggtcgcgggggtgtgcggggacggggggcttttgcagcgacgagggttgcgcggccaggagtgtgcggagccggggggctttgccggcggacacgggaccgggggcggcggggactccacaaaccacacgcacacgcagctcacttcagcggtcgccctatcagaaccgccgctattctttattaacgtcttaatcccccccgcttatacacgcaacgctgcatgcagctatgctcacactctatctcttcacagcgacatgttgcttcgtctatgcactgccgcagcagacaccagcggacaccgccatctgccaccacacatggcccatgtgctccgacgtcccgcatcctacgtcgtctgctcacaacacggcgctttcttccccgcacgccatctccatcgaacaccgtctgctgcattcgccgtcgcctccacgagagaacatacgccacagcatgcgctgtcgccgccgcgacatggcctcctcggcttccacacctgtttcgcacacccaacctctggctgccaaccacagacgttcaaggatcacgtacgcgacgaccgatcccaccaattctccaacggcctcgcccgccaagtcagacaagctggaagccgacgcagacccagcactccatcgacgcccggcctcgctgttgcgccacctcttccagccctgccacgcccaacgcggcacttccaacagagccacatcccagagggcttccttgaacgccgtgcaccacaaactctgcggcgcgatgatatcttcgtcgtgttccaccacttgcacaccgctgattatggacttgccgtcgctgtccgtggaactatctgcaggacacaagaaaaaagaaacaccaaccgagggtgggtggggcggtgaagaaggggaggacgacgttctcgccacaatccgcaacacgttgtccgccccaacctcacctgctgcggctaccacgcatcgactgtcgttccctggagaatcgaccttctgcctcaccgctgtttccgagtgctcacaacgtcgaacatcaacggctgcattaacgccgccgccgccagcggtagctgctgcgttctctttttcgtccacggtctccgagaccggcacttttccgcagagcacaacaggccgcacacgtgtcgacgacaccgccgtcgttaccgccggagacccgcgctctcctgtgacacacgtaactctcctccagatattccgtctgcgtagctcgctgctgacgagcaggtccggcggcgctctccgcggaggtgagcacgaggccatccccaaagtcgcgtcgctgttctggacgctgctcaaagcaacacagatagttgagatgactcacaaaacaccgagtgccgactctcaccgcaacccacaaaaatacaccgaccgcccacaacgcctgctgttgacagcacttgccatctggcaacgaacctacaatgacacgcgtgccgcccacgcgccgcaagtgcgtttgctcggcgacatcctcacttaccgcagaccgcaaactgccaccgcgtctaccaaagcacacacgcagcagcagccagaggaaccaaaaggccaacagatctggacgcagacagccggccaggccgcgccacacggcgacgagccgcatagcgacggcgagctacgccgcgagtcgcattctgcaccgccgacgtctcgtacactacccgatacgattttggcagtgaaacgccgttccgttgcccaacggtcacacgtccgactggacgcgaaacccggactgaatgagcgggacggctttcgccaacggttgttgctccccttatccggctatttccgcgccaacgagctccggaatcaacaatttatgggctatggaacaaagaacggccttaagaatacttggctcacccgccctctgggtgtcgcggggggtgtgcgggagacgattggggagcgacaagacaggaacgtggcggactctgcgacgcaacgcgttttccacacgttgtacgccgcactgcagaccgtacgggtgtggtataccgcgttaggcaccgcgtggcgtacctcggggtctcgtacgcgtgagtctctgttcgatggtccacgacgtcgcgatcggcaggcggcccggctacggcgcttggagctgtagccgccagagacttgtctagccgctgctgctcccgctgcgtgcctgctgctgcgtaaagtacatcagggccaccagacagactccgatgaagatgacgatagcaacactgatccaccatctcctgatggcgttgtcgggccaccagggctgttccttggtcttgaccagataagtactggtggtgacacacttgggcgccgtcatgccgcgactcctccaggttgctccggcggttgcttcggcgagtccctggtcgagggaaacgatccctgcggtgaaggaggaagagcagaaggaagaggagtttccctgaagcagcgccgtaggcaagtgccgcggcgcgtgtccgggtggctttataacggccgtcgatgatggtttttaaaccgggacgacggtggttcacgtgaagtaccaagcgacgatactgaccatgacgccgagcagcagagtgaagacgatgacgttgaacaggatttccagatagtgtcccatgttccgcgtggttcctgcgcggttcctgcgtggtttctttttttcctgtgttaacaccggcgtttttgggacggtcggttaacgtgggtttcaggggaaggccgtaagcacggggaaggagcgctgataggcaagacaacgcacgaaggtccaagcggcggcggcgccgacttccaccatcaggccaacgaccagcatccgcagcagcagcgcccaggcgatctcgcgctcgacgacggctacggcgacgaggcagaacatctcaacccagacgacaagcgccaggaggtagagcacggccggaaagaccgcgggcgttaacatctagtcgcggagaaggaaacaaaaactgttgaaaacggggaccgagaagttgcttcgctcaggagacaacgggagcgaacgggatggcgctagatacgctagcggggctggctatctgcgtgggtctaatcatgggtgtcaccgtgatcgcgtcgtgcgcgctgctggtgttttattattgcgatgagagaggggatggccgtccgtcgaagctgttgcaacgtagcattcgacgttggcgacacggccttagcaccgaatccttaaccgctatcctgccggacggttcgtccacggagcaggagatctaccacacgcgactttaagtcacggaggaagttacgtgggtaggagggcaccgtgccccgaggcggcgacgggctagcgtataacaagccgcgcgacatcgggcgagcggcggtgagacagacgcgggcacgtcggtggcgatagccatgagttccagcaacaatctcgatccctggattcccgtgtgcgtcgtggtggtcatgacctccgtagtcctgttcgcaggtctgcacgtgtacctgtggtacgttcggcggcagctggtggcgttctgcctggagaaggtgtgcgtccgctgctgcggcaaagatgagacgacgccgctggtagaggatgccgaaccgccggccgagctggagatggtggaagtgtcggacgagtgttactaggagatcgccgcggccgatgggctacaacacggaggggaaggggggtacaaaacgtgaaattagacttttttttttaatgatgttttgtccctctctgtcttactctcccataggctgtaaggccctcgaggaagagacttacggattgtagttgcagctcgtcagtttgttgtgtacgacctggcgtgtcaatgaatgggtcatggtggtgacgatcccgcgaatctcagccgttttctcgggactgtagcagacttcgccgtccggacaccgcagcctgtggattcatgaaaatctactctggcattcccgaggatcgtcgatggaacatggctatcagaaacgtcgagagacaaatccagacgcaccacagaacgcagacaatcatgaaaatacgtacgcgacggtgaagcgattgcacattttgaaatcgtaacagcgttccggcgggtggttgacgtttatgaattcgcaacattcttctgcgcgcacccgcggcacgcggctgtgacccaatagcagccacaacgtcgtcaagaacggcgtcaggtctttgggactcatgacgcgcggttttcaaaattccctgcgcgcgcgacgggctcaaatgatgagattgggatgggtacagaaggtgtaagtctggttattggcctcggtgaacgtcaatcgcacctgaaaagacacgctgtagtcccggaagacgtgggcccagctctccagcttcatcacacacatctgataacgcgtgccatcgttgacgacgaagcgtagcagcttggtctgcttgggcaccatgtgcgctccaaaaatcttggcgtcttccacgctgatctgcacgtttccgtcgctcggtttcgaagccgtttggggcatccgttggaggatggtctggttgcgaccgctcagataccagatcacctttttcacccaggtggagcttctctccaccaaggtctggccttcccggttgtacagcagatacagggtctcgttgcgacactcgggacccgttgatacctgctggaaccccgagaattgcaagggggaccgtgggggcgagggatagagaaaaggacagtaaaacgtcgccgcgtcatgcggtttggaatacgtcagtttagaccatggcggggacggattctggtttgccgttagcgtcgaccacggagacgccagacagggcgttgcccaaaccgcgcacagaagcaggcagtgaaagtggtgacgaagcagaagccgcagcatattatttcccgtgacgcaggctagttggcaaagagccgcacgctgaactcgaggctccgggcgtgtggcgccagcgaaccggcggcgttgaacgtggtccttttgttggtgccgccgcgacggttctgacgtctaaagtcgctgatgagcaacgacacctcggtcacgttgattctgcaagcacaggttccaaacgtcatttcataccccatgcggttacttagccgttacccgttcgcccttaccttcccgttgtcatgcacctttagcgcgtaccctcacctcttgagcacgtcaaagttgtccaagccgtggctcgcatcgtagtggtagttcaacgtgaggtccacgagctgttccacatacttgtaacgggtttggtcgggcagcgcgcgagagcacgcgtcccagtaatgcggtactcggtaataatcgtttttttccgcggtttcccgctggcactgacccagcaccacggcgcacagacaaacagacagccacacccgacacagctgcatgttgcagactgagaaagaaagctttattatgagacatcatacacatagtataggcgaggtgatggggcggggaaagagttggaaccgaaagacaaaaaaaaaagcctagtcgtactcgggatctctgagcgagacgggttgcatggcaactttcattagtttgggaatctgccagctggtgctgttcgaaggttcttccatttccgaggcggtcagttcatcgtacaccgaaacgtagtacctgatggggtcctcctcattgtccgagaggtgagattcgatggtcaaaggcgagcctctcccataattgggattcacgaacgacgtgtccaagttgccatcctttctgaaatagatgacgttctcaggatcatgtttcatgcgctcgcgggccgcggacgcctcctcctcctcgtcccagtcccgagtttccaaccgctgataagggctcgaggaacaaaatccggcggggatctgagaacctcgtcgggaaccgctgccaaacgggctgctgccgccactgtcgtccgtgtcgtccaacaggttgacggcctcttcgtcggcgaaacgaaagcggcccgggtgcttgcaacacgaggagtaaactaccgcgatcagtaccgctatgaagctgaaaatggaggtgcctgtcacgatgtagaagaggatagccagcactttcatgatctcgttattgcgcacgttgtgaacggaagactcgtgggtggtggtcatgttgatcccggttgtgggtccgctactcgtggcgttgtcgacgttatttctgttgctggtgctagtagggacttttgtgctgctggtcacattcgtagcgtcgctgaggtctatctgaagcagcaacccgaacgcgaccagggccaggaatgttgcgcgaaggggaccccgcaaggccggcattctcgagatgtggcgacgtggatttcttgctatgtccgcgaacgacgtgtgacgaggacgtggtttccgcaagcctctaccgacgccgcgacaccaggtaggttatcaaaacgcgagcccatatcgccgccatcattgtaatcagcaatgtgttgaggtactgcacgatgaatctgtctagtgacaccagccaaccctctgcttttgcgggcaagcgcgctttcggtgacagggtgtatcgtacgtagccgcgggtcaggcgcgcgttgtagcggtacacgcagaaatctatccacaggccaacgcccggctgtagcttcggatggtggataatagcgcggtgacgtacgccgcggggttttagaatctccacctgtaaggccatctcctccaggtagtgggtctgactgcgacgcagcgtccagttcatgtaaaagtcggtctcgccgtgtccggccacgaagaggctgcttactaaatcgggcgccagagctaggtcaggcgtatcaaattccactgccaggcgacctgattctaacggttccacgatccgggagagtgtttctagatatagagcaaagcgtaccacgtctacctgcggtgtaaaaaactgttgtgggcgttcgccgtcgttgaccacgtaggccacgtagaggccaacattttccaccacgggttctagctgcaggcggcacgtaaagcttagaaacgacggctgtacggtttggttcccgtgaagctgaagcgtcacttccttgccggggctcaccgtgctgtaacgccgcaccgagtcggtcatctgctccagatcggtagaccagaagggtgtgcaatgcatactgtcccagtcgcgacacgcagcccagcctagctcggtgaagggtcgacgcacacccgagaaagtgtgcttgaagaccagggggtcgcctcggtagctcagtagccgaacatgcacatagtcgcggctagcgccgacagactgcccgtggagggccagcaggacgagcgtgaacagcaagcgcaacatgctgcgcgggttaggaaatgcggcgtgtcggccaccgcccgactcataaacgctaccagcatgacgtctcagatcacacaagtgacgaggagcgtaccgcaaatcactagggaaaaggccagcagagcccgatagtcttgctcttcgcgaacgatctcgtccggttcctcgcagtcttcgtgatccgcagaagatgaggagcaggaattttcgttaatctctgcgaggatgctagtgctgtaccacaccaaagcgcttagcgtgcccagagctaccgcacggtaaaatagggacatgatcaccagcgcagtctgaagtggtggtagttcagtctcttggcgtatttccaaagaaaggctttgtaggccgtagggactggccaggcaccgaactcaatattggtagacactacgtcgtaaatgcgttgttcctcgtctaagattaaccgaaaaaatagccggttgatgtgacgacgcacggcttgcgcgttaggattgagacacttggttcccttgtcctttaaaatagccagcacttcctgacgattgcagctttcgctcgctgcgattggcttaagcaattcggttccgaccggcagggtattcaacagaatttggttgttgcaacggcagcgcctgtcgtaatcttctagttctaaaacatggacggctaggggacatatggtaagtaacatatatgcgattaatgacaggtgtcgtaccgataacagattgatatgcgagtttgaaaccggatggtgcaaccatgttagcaccatattaaacacatactgtaatattttgttttaacgaacttgtctgtttgaaaacatacattaaatattatcctctaacacctatcaaggttatatttattcgtctcggtcctggtgatttcgttatgttaacattataccacctattatcgttgtgtttgtctaaccattttgagaagaggtgatcgggcgataaacatactccaggtccaggcggtttccttccgtctggatacaataaatgttcatttttatcgcatccgggccctctgggatcgcgatgaagccaataattacccaatataattttattaggcggccattttctatgaagacatctgcagcgtaattctgttccattcacctcataatgatacacatatgctaaaaaaataatcaacgcaccaaaaattaatcgcattataattttattatctacgtcactaccagtaattcgtaatatccggtattcccggaaaatcgctcaaaactgcgtccatgacacatcaattcccgataagtacccccctttgaaatcggatccccccacataccaatcaatcacacaacacagaggtttaaaaatcgatcacacgtcaattaggtttcaaaatcgatactgtttattatcaggaatctagactaattctacaatgacagctctaaatttctctctcgtctttcttgtcaggttctcatcatcaatcatcacttccacccatcgaggagtcatcgtcgctccaaactcctttggggtcgctagttggaaaagtctctgacacgatccaggcaccccgcacccagtccgactgatctagcttgcggagcatctcaacaggcatgagctgcagggccacggctgtcacggcactgtatcgatgtaacactagggactttctttgcgatgtagccatcaacacggcgtatgccccgtagttcgcgtgatacgacgcatgatgggttaaacgttcccatccggcagtgccgtctcgggtccgtgcacataacagctgcacggcgttatgatgcttaaaattaaccataacgctggggctactgatgaaggagtagtaatgagccaggacgccgtacatcgaaggcaacaagaaagagtgacagcacgatagcaccgggctcttatgtaggcgacagcttatttttcctgacgtcggcaaaaagtacctaaattccccacagatactcagacacggttccgtaaagtgcttctttttttagtgcaggaattggaaaaaataataaaaaatatgaacagctcatctgtaattatctgtgtgacttcatcgtaccgtgatgtaaaaacaacaacaggaagcttacagggtgcggtagaaaattttgccgattgagcaacactgttggcatctctcactccgataggcggctataagatagagaattaaaagtatgatacccacaagaaagataaagagagacaaccaggctagagtatgacgaccgctttttccttgtttgacggttatatgtgcggtatgattttgctgtcgttgtttgtgatgttggacgcctggagtggaaaagtacgtatggttcttaggtgcgcatacggtattattggtggaagtgcagttacgaatcatgacctgagtgacgttacattgagtgcaatcggtacagttgtaaagtcccgatacatacgtgccgttggggcaaggggtacacgttacactggtataatccgtgcatactttagtaactctttgtcccgaaccacacggagggcagcactcattgcccagttgcacttcattatgctgacacactttagtcactccaagctgcaataatatcacagcaaagcagatgagcattatcagaggcttcatgcctcctaccggaagaataaaaataactcatggggccgaacggtatcatcctctccgcggtttgtaatacgagatcgtaaacgtaaataaatgacataacttcactaacccgcatactgcaaagtccacctacgacgccaaaagtttttccaggacagaacaggatagttagccatcttcacaggtaaccagtttccagccacagtatagcgaacctaagagaccgcacacggtctctgctggaaaaacataccactacatcgatttgtcgtgccgtacaaccgtcaagttttccgaacttttatacacgccaatggcgttaggactatgtgtgctgctgtgattggaggcttcgtgagttatgtgacagctgtgattacacctgtcgccaaggctgacagcggttacccagatggagcacaatcacaagctgatggacgttggttgacccgttgattcccatggatattttaacggtgacagtacagctcccgttaaacattagattaatagacgctagtggatgacagcatgttattcgcccaaatgtgattgtggctatactttcttgttttttgctcatatgctgtaaggtgttcgaggatcgtggggagtatatgtgttgaatccgaatcgtctttactgaccgcgccatacctcgtatacgaacttaaccggcgtaaagtgtttcccgatatataaaccggcgcctattgtggctgtagcgcccataggtatggcatatatccacggtgatgttgtgttattcgttttttgtgataaaacgtagcttatgtttaacgtgtgtttcgtcacgttatgtgtgtcgttaaaagacggcgtctgtacagtatggctttgagttgtattttgaattgttattgtatttggaggtattgtgtgcatagtggttgttgcgtgttgagatgttgttatgttttgaggcacagttgtggtgtatacggactccaaggtgtagttacggagtctttctatgcaggtagtgttgagatatttttgaatgctggttatgttcgattctgtgaggttaaagtgtgtactatttatgacggtgtaatttagacggtcttgccatcccgaggatgttagtgttaggtaattcgtgttgttcacgtttacttgatatgtataggtaggtgtactgtttgtgaggtcgcaagtgtgattctcttgcagagattttatccatcttgtgtgaaaatattgagatacgcgatgaatgttttcgctatctatattataaagcgtttcagtgtcacctaggggttgtttgttgtaacttttattttggacccagggtgtgaaccatgattccaatacttgtatagtaaggtgtcctattaataaagacgaactgattcctaccgtaatgttataccgcacacctagggtgccgtttacaaacacggaaatgtttccgttgcaaaccacgttggtagatgaattagattccaagtggtaacgataggataatgaccgttcgctcccaacggatgacacaaagtatccgaataaccaccacacccattcaatccgcatattttaatcacactattcacacttcacacactgcattttttaacatattatttttttattttatacgtgttctcacctcttcatctttctaacaccggggtaactatcgtaagtcggtaggcgtcgatagccctcaccgcctcgtcgtccccttcccggcgtgggacaccagcgtccacaacactgcagataacacaggtagcataggaaacatacggtaaaaatactccaaaaccccaaaaacgccgcgattccccgagtggcccagggagacatcccggtgtctatgtcggccggcggtgctggcgtcaccggtaaaaatttcggcgggtgtggctgcgaacggtagcagtcgccggggagccggtaacgctgtatcactgtccaacagcggtcgggttcctcgtccggacatgcgggtttccagcaatcctcggcgtcggcgcggccgatatagaagtagttgcgttgaaagccgcggtacgttccgcagtcgtgattccgtagacgccagggcgtcggcgaccagatctggtctcccagcgagtagcgacctaacgccggtgtgcagcaaggttcgtcgggccggctgagcgtctccagctgcgtgagaattacgaagcgttgcatgatgaggccgtggctgtagttgcgtagcacgcattcgtacatgccggctgtgtccatcgatacgttaaaagtaagcgagaatatttggccgagatgcaattgcgagaaattccaagtggcgtacggcaggcggtactggagtccgttcatcagccgatggcctttgacggcgtccaggatgagctcgtcgctgccgtcgtgggaacgacagaaacgtgcgcgaatggagaccatgggccaggagtgtgtcatgaccgtgcaggggatggtaacttgctctccctcggcgaccaacaccggcgccggcgacgtggtctcataattctcggcccacatcttttcggcaatgtcagcggtggcgaaggggaacgaagaggaagaatattcgaggagtcgcgggcagctcaacagcacccagaacagccacggcagagttcggagcgactcccggcggcacatgatgattcttttcttccctttttcacagagacgctgcccgcctgctcctgctccgtgtgtcggccgctcaaacgtcgggccggcgtggtggtgaccaccgtgcgacgcagcttctcgcccgggatgcccgcaactgagcgtccggtttttttgcaggtcttttttgctgcctccccctcgccgtcgccgtcgcggccgacgtggtggaccagcaccgcgcaggaactctcgcgtcgccggcggtacgcgacctgtctcattgctacctcggatgtttaagaaggaacgttcatctgcgtcacagggtctgatgaagctgccaagagtcgtggctgtgtcgtagtgcgttctgtacagcgcgtttcactgctttctgcatggccgccaccacgtcgggcgggagcggctccggcggaagctcgatgagcagttgctgcgagtctcggcgctcggcgtccgccgtttcgtcggacgtggcgtagaaaaccgaggtggtcgcccagtcgtccacgctgtcgacggcctctgtcagtgccgggttgtcaaaaccgccatcggacgcgggtgataaaagaacgtacgatgacacgctgttagtacgactctcgtcgtcgctctgggaacgacgtgatggacgacggtagatgacctcgtcttgccacgcgtcgaagcggtcgcaacagcgctggatccaagcgcagcggagcagcttacggaacacgtcgttgttccaaaagtagagcataaagagaaagaaaagtagcgtaacgataaagccgaaaacgacgagggtcggcagggcactaccgccgctgccgttttttgcgtcgtgcgggtgcacggtggtagtcgcgttagtctgagcgggggtcatgacaagtctgaagagatgagagcacgggtgctcatcaggaacagttgaggtctctccctaccgaagccttagcctctacggtgttttatgatgaacgtgtatacggacgtcattgtgaaagtgacgtctcaggccttccgaaaccgcgttaggttcaacgtgggtttcggtttagcctacgtcaccgaggcggaggtggaaatgagccgtcctgtgggggagtgtacgaccctgtagtgcccatgggtaacgttgcgtcggaagaagtgaatgcggcattggtgtacgcgtgggttgttttgctctctgactcggaggagttgccgcagcagctgcagattttacgtactagccaaaagcagcaaaagcagcaggtaaataagagaaggagtccagataatgtccagccgctagcggcaagcagcgcgagctgtggtactgtccagctactgccgttagaggcattaatacatgtcgatacggtcgtgttggcggtagcactagtagattgactggaattagagctggtacctgtagtggtttcactcgccgatgcggcgagtgcaaataaaactaatatccacagcatgttcgttactatataatggatataccaactcgtttgtcgtaacaatcagcgttatacacgctgtatcggcatcgttttaccggaaagtttatcgtaatgtaacccgcgttgtgtacattcgtactgacagggaacccccggtgatatgcacattatactctttcattctggggtttcccaatgacgtaaaaatttccactacacaataaaattacgaactcatgtgaaaagtgtgctttttattaacagagcagagggtttacagtagatatatgtttgccagggccaccgttttctaacaccgatcaccgccaccattaccacccgttgaactccacacccgggagccgcctgatcgccagggactcctcaccgtccatcgtccgaacaagctcccgccaccgatgctgccaccatcaccgagggaaagaaccgcttgctgcagatacgcttgggctcgcctccgtgcggatgccgtttcgtgcagacgctgagtagatcgagcagagaatgtcaaagcgacattatcgcgatccgctcccctcttttttctttttctcattcacgtgtactcttgatgataatgtaccatggctacggtggtgaactgcgtcgcggatcccgtcacgggtttcaacagatcgacgtcggtcagcggcgccgtcaccgccatgtccggcggaggcacgctgtttctctggctagcgacgtggaccgacgacgaagacgatgaacccacacggcggtctgttatccgcgacgacgcgtagctgcactgggaagacacttcctcccaacggaccaagatctcgtcgggccgttcggagaaacggtatcgtctgtccgactcccgccgtacggcgccgaggcccagagacgacaggtccgcgaaccggcgctcgtactccccgtacagctcgcaacagcggatcagccagcggtagctcagaaacatgcgcaccagtttgaaggtgtcgtgccagtggtaagccagatagcagaggatggccacgatcagcacgagcatcacgccgatgatgggtaacccgacattcagcggcagatcgtccatggtgaccgtcctctgtccggatctacgtcccagtctctctcttttgtacagcactcgcgcgggaacggccccctcaaccctcttacgtagcgggagatacggcgttctcccgcgggccacttacttgcacggtcgcttgaacggcggcttggaccgccacatgcaccgcatccatccattctggcagcagtgcgttcggcgacgtcgtacgagtcgcgggtgatgttaccccgccagcacctccgccggcaaccgcgtcgtcgttgctatcgtcgccggtttcgggcgatgacagcgccggcggcgcgggtctcgtctcgtccaccatttccaccgtgtcgaagcgacagccgctgccgtagtacatagctccgttcaacggccggcgggccgggtcgccgagttccgggtcgggcacatccatggcttgccgtctccttctctgccgctcgtggtgccgacggcacttctcgggataatgacagccgcaaaatagatcgtggagcatgtctcgccaactgtcctggtggtaatatcttaagtacgcgatgagcgcgccgatggccataatcataagcgtaagcaaaacggcacagataacgtgaaacaccgcggtcatccaagtcgggcggcgtcggggacgcggtgggtcggtttctcttacgccggcgtcactcagccaccacacccgtagccgacattcccagaaccggtgaatgcgactcagggcctttcgacgccgccatttatttctaacgtccaagtcccacgtcatttctggcatctccacgcccttgactgacatactctctttctctctcttagctgcggtgaaaaagagggaaggcgtgtgctgctatacaactgtacaacggacgcgctcgctctttcggtctcaggtcatctgcatcgactcggcgtccttcatgacgctctgcaccgcctgttccaagagttcctcgatgtccgaccatcgaggaggcggggctagctcggaaaccgacacgataggcagcgtggtcggctccgtcggcgtgcggggtcggggacagggacacgagagtcccaccttcgagagattctccagaccgacggtgcgcggtagtctcggattccgcggcggcttttgtggcgtcggcgttttcgggaagggcctgggtgtcaccggcggtgtccagccgaccggcttgggtttcgtgggcggcggcgttttcttggtgggcggcgtgctcaggttcttacgcggcgcgggtatcggcgtcgggggtctgtgcgacgacagccgcgtggtgggggcccggaccggcggcgtaggcggccgcttcttgcgcccgggcggcggaggtggcttccaggatggcggcggctgatgcagcaccgtgtcgacgctggtcgaggacgacaaagagctcgacgaggagcaatgcgacggagatcggccgatgctggtcggcgttcccggcgtggatacgtcggggatctcgaaccgcgccggaggaaactcgggtttatctatcggcagaccatcctctcctatgtagagcgacgtacaccgcggcacctgcggcgtcggcgggtgggtggccacccgcatgagccccagttccagatccagcggctcgacgacgtcttctttcggatttcgatagcagcacgcgcaggcaccacgcttatcagaagcagcacccgggagccggcctcgcgacgaagtctcgtcggatcgcttgcggcctcggcgctgggtaaataaggaaatggccaggaccagggaagccagtccggtaccgccgaggagcccgatgccgagccatatccacaccatgatcttctctcctgcttggaatctcaaactccgtgttgggaagggccggtgtacggacatttatgccttggatttctggaaacgtcattttttggcaaggaatgtgtttattgtccaaacattgaggaaggagatgtgcgccaagtcggaaaattccttatcgcaccgggggcgggttacgttccggtctgatgctgctgctgttgttgtagagccgcggccacggccgcctgcacggcagcttgtaccgcctcggccacgccgggtggcatctgcggcatggcggggggaggcgcgtcgggcggaccgccgggcattgccgtcggctgcgacggtggttgtgaactcaccgtcggttcgcacggaggtttgtctttcggtctacccttcggtttatctttcgccctacctttcttcggtttgggttccgatgtcggtgctggcggctgcggtgggatgacgggctggtgggactcctccgacggcggggggacggacaccgtcggcgccgaaaccgggggactctcgactatctcgcagatcaccctgtcgggatcgtcgccgtgtccgggacgccgtcgatgaccgtattggaccatgtcgtaaatcatcgtctccttgtaacacgctgaacagcagcggctacaggggcccgagatgcatttgcagctgcacttacagctgcagctgcagtagcgaacccatcggcaggtaaggaggtcgattacggagtctttgaagaattcccggtaacggatgagatacgcgcagaggaaaatcatgaaaacagaacagccgactacggctgcgatgccgggtcccgaagagacatccgccgacgatcccgccaaacaccaaattcctaaagccgcgcatgttatccaggccacgataatcgtgggaacgccccattggcattgccacgaaggatcgtgcacgtcgcaacccatcgctactgcgttctcccacaaacgccatcgcactatttatccctacagcggctgacgggcgaatacgctgcggcaaagtgaacgacaaggcgcagtacctgctgggcgccgctggcagcgttccctatcgatggatcaacctggaatacgacaagataacccggatcgtgggcctggatcagtacctggagagcgttaaaaaacacaaacggctggatgtgtgccgcgctaaaatgggctatatgctgcagtgaataataaaatgtgtgtttgtccgaaatacgcgttttgagatttctgtcgccgactaaattcatgtcgcgcgatagtggtgtttatcgccgatagagatggcgatattggaaaaatcgatatttgaaaatatggcatattgaaaatgtcgccgatgtgagtttctgtgtaactgatatcgccatttttccaaaagtgattttttgggcatacgcgatatctggcgatagcgcttatatcgtttacgggggatggcgatagacgactttggtgacttgggcgattctgtgtgtcgcaaatatcgcagtttcgatataggtgacagacgatatgaggctatatcgccgatagaggcgacatcaagctggcacatggccaatgcatatcgatctatacattgaatcaatattggccattagccatattagtcattggttatatagcataaatcaatattggctattggccattgcatgcgttgtatccatatcataatatgtacatttatattggctcatgtccaacattaccgccatgttgacattgattattgactagttattaatagtaatcaattacggggtcattagttcatagcccatatatggagttccgcgttacataacttacggtaaatggcccgcctggctgaccgcccaacgacccccgcccattgacgtcaataatgacgtatgttcccatagtaacgccaatagggactttccattgacgtcaatgggtggagtatttacggtaaactgcccacttggcagtacatcaagtgtatcatatgccaagtacgccccctattgacgtcaatgacggtaaatggcccgcctggcattatgcccagtacatgaccttatgggactttcctacttggcagtacatctacgtattagtcatcgctattaccatggtgatgcggttttggcagtacatcaatgggcgtggatagcggtttgactcacggggatttccaagtctccaccccattgacgtcaatgggagtttgttttggcaccaaaatcaacgggactttccaaaatgtcgtaacaactccgccccattgacgcaaatgggcggtaggcgtgtacggtgggaggtctatataagcagagctcgtttagtgaaccgtcagatcgcctggagacgccatccacgctgttttgacctccatagaagacaccgggaccgatccagcctccgcggccgggaacggtgcattggaacgcggattccccgtgccaagagtgacgtaagtaccgcctataggctctataggcacacccctttggctcttatgcatgctatactgtttttggcttggggcctatacacccccgcttccttacgctataggtgatggtatagcttagcctataggtgtgggttattgaccattattgaccactcccctattggtgacgatactttccattactaatccataacatggctctttgccacaactccctttattggctatatgccaataatctgtccttcagagactgacacggactctgtatttttacaggatgaggtctcatttattatttacaaattcacatatacaacaacaccgtccccagtgcccgcagtttttattaaacatagcgtggaatctccacgcgaatctcgggtacgtgttccggacatgggctcttctccggtagcggcggagcttctacatccgagccctgctcccatgcctccagcggctcatggtcgctcggcagctccttgctcctaacagtggaggccagacttaggcacagcacgatgcccaccaccaccagtgtgccgcacaaggccgtggcggtagggtatgtgtctgaaaatgagctcggggagcgggcttgcaccgctgacgcatttggaagacttaaggcagcagcagaagaagatgcaggcagctgagttgttgtgttctgataagagtcagaggtaactcccgttgcggtgctgttaacggtggagggcagtgtagtctgagcagtactcgtggctgccgcgcgcgccaccagacataatagctgacagactaacagactgttcctttccatggatcctttctgcagtcaccgtccttgacacgatggagtcctctgccaagagaaagatggaccctgacaaccctgacgagggcccttcctccaaggtgccacggtacgtgtcggggtttgtgcccctctctttttttttttaataaagttgtatttttaatgttatatacatatctcctgtatgtgacccatgtgcttatgactctatttctcatgtgtttaggcccgagacacccgtgaccaaggccacgacgttcctgcagactatgttgaggaaggaggttaacagtcagctgagcctgggagacccgctgtttccagagttggccgaagaatccctcaaaacttttgaacaagtgaccgaggattgcaacgagaaccccgagaaagatgtcctggcagaactcggtaagtctgttgacatgtatgtgatgtatactaacctgcatgggacgtggatttacttgtgtatgtcagatagagtaaagattaactcttgcatgtgagcggggcatcgagatagcgataaatgagtcaggaggacggatacttatatgtgttgttatcctcctctacagtcaaacagattaaggttcgagtggacatggtgcggcatagaatcaaggagcacatgctgaaaaaatatacccagacggaagagaaattcactggcgcctttaatatgatgggaggatgtttgcagaatgccttagatatcttagataaggttcatgagcctttcgaggagatgaaatgtattgggctaactatgcagaacatgtatgagaactacattgtacccgaggataagcgggagatgtggatggcttgtattaaggaactctataatgtgaccaagggtgcagctaacaagctagggggtgcactgcaggctaaggctcgtgccaaaaaggacgaacttaagagaaagatgatgtatatgtgctataggaatgtagagttctttaccaagaactcagccttccctaagaccaccaatggctgcagccaggccatggcggcgttacagaacttgcctcaatgctctcctaatgagattatgacttattcccagaagatctttaagattctggatgaggagagagacaaggtgctcacgcacattgatcatatatttatggatatcctcactacatgtgtggagaccatgtgcagtgagtacaaggtcaccagtgacgcttgtatgatgggcatgtacggggctatctctctcttgactgagttctgtcgagtgctgtgctgttatatcttagaggagactagtgtgttgctggccaagcggcctctgataaccaagcctgaggttatcaatatcatgaagcgccgcattgaggagatctgcatgaaggtctttgcccagtacattctgggggccgatcctctgagagtctgctctcctagtgtggatgacctacgggccatcgctgaggagtcagatgaggaaaatgctattgcagcctacactttggccaccgctggtgctagctcctctgattctctggtgtcacccccagagtcccctgtacccgcgactatccctctgtcctcagtgattgtggctgagaacagtgatcaggaagaaagtgagcagagtgatgaggaacgggaggagggtgctcaggaggagcgggaggacactgtgtctgtcaagtctgagccagtgtctgagatagagcaagttgcctcagaggaagaggaggatggtgctgaggaacccaccacctctggaggcaagagcacccaccctatggtgactagaagcaaggctgaccactaaactattgtatatatatcagttactgttatggatcccacgtcactattgtatactctatattatactctatgttatactctgtaatcctactcaataaacgtgtcacgcctgtaaaaccgtactaagtctcccgtgtcttcttatcaccatcaggtgacatcctcgcccaggctgtcaatcatgccggtatcgattccagtagcaccggccccacgctgacaacccactcttgcagcgttagcagcgcccctcttaacaagccgacccccaccagcgtcgcggttactaacactcctctccccggggcatccgctactcccgagctcagcccgcgtaagaaaccgcgcaaaaccacgcgtcctttcaaggtgattattaaaccgcccgtgcctcccgcgcctatcatgctgcccctcatcaaacaggaagacatcaagcccgagcccgactttaccatccagtaccgcaacaagattatcgataccgccggctgtatcgtgatctctgatagcgaggaagaacagggtgaagaagtcgaaacccgcggtgccaccgcgtcttccccttccaccggcagcggcacgccgcgagtgacctctcccacgcatccgctctcccagatgaaccaccctcctcttcccgatcccctggcccggcccgatgaagatagttcctcttcgtcttcctcctcctgcagttcggcttcggactcggagagtgagtccgaggagatgaaatgcagcagtggcggaggagcatccgtgacctcgagccaccatgggcgcggcggttttggtggcgcggcctcctcctccctgttgagctgcggccatcagagcagcggcggggcaagcaccggaccccgcaagaagaagagcaagcgcatctccgagttggacaacgagaaggtgcgcaatatcatgaaagataagaacacccccttctgcacacccaacgtgcagactcggcggggtcgcgtcaagattgacgaggtgagccgcatgttccgcaacaccaatcgctctcttgagtacaagaacctgcccttcacgattcccagtatgcaccaggtgttagatgaggccatcaaagcctgcaaaaccatgcaggtgaacaacaagggcatccagatcatctacacccgcaatcatgaggtgaagagtgaggtggatgcggtgcggtgtcgcctgggcaccatgtgcaacctggccctctccactcccttcctcatggagcacaccatgcctgtgacacacccacccgaagtggcgcagcgcacggccgatgcttgtaacgaaggcgtcaaggccgcgtggagcctcaaagaattgcacacccaccaattatgcccccgttcctccgattaccgcaacatgatcatccacgctgccacccccgtggacctgttgggcgctctcaacctgtgcctgcccctgatgcaaaagtttcccaaacaggtcatggtgcgcatcttctccaccaaccagggtgggttcatgctgcctatttacgagacggccgcgaaggcctacgccgtggggcagtttgagcagcccaccgagacccctcccgaagacctggacaccctaagcctggccatcgaggcagccatccaggacctgaggaacaagtctcagtaagtgaaaaactggaaagagagacatggactcttgtacatagtgattccccgtgacagtattaacgtgtggtgagaatgctgtttaataaaagtagctttttttatacatctccgtctctggtctcgtgatgtgggggtgcgggtggtcccggatacttgtccttctccccctcatgtgtatagctctgatggcaaggggcacacacggggcttacatctgctcccccaacccagggagacttagaatctcttgcgccctctcggtgttggaccaaagactgtggtgggagatccagtattcatcgggtcgtctcacccgagtcctggtctttcatgatgagggtgatgagggtgatgacttacatctcacggatacccgtcactgcacttcctgtacacatccctatgtgatttctttggttaccccgctgaccatcaatgccacgctacggctgctgatacgggatggaatgtacgggcggggggagaaggagttgtgcatcgcccatctacccaccctgcgagacatccgcacctgccgcgtcgacgccgacctaggactcctatacgccgtctgtctgatcctgtcgttcagcatcgtcgcggcggccctgtggaaggtagattacgacagatccgttgcggttgtgtccaaaatctataaatcatagccactgacgcaggcacgtcattgacagccggcgacgtcgagagggtaactatgtaccgtgcgggggtgacgttgttagtggtggcggtgataagtgtcgggagatgggacgtggtggcggttgcgattgggtggtatgagccccaagttagcgtggcttatatgtatgaacataatgacactaacctgactattttctgtaacactacagcttgcgattcgccctttttggcctcggggatgatgattagtattccacagaacacacagtttctcaccagcaaagtcaactacagtgatgatatgtataacgataggaaaaattatactcatgaactgaaacgcatgctgacaggggcaccgggaacctatgtgaacggcagcgttacctgctggggctctaacgggacttttggtgccaaaactttcttagtaaaatccatgatcaatacgacggccggtaacaccagcacgtcaatcatccactttgttcaacaggatgaattggtggagaatcctgcatactttaggcgcagtaatcatcgagcctttatgattgtcatactgacgcaagtggtttttgtggtgttcattattaacgcctcttttatctggagctggacatttaagcgtcacaagaggtgacgcggcctctcgccacatatagctcgtccacccgccgtcttgtcacacggcaacatgtgtcccgcactggcgattgcgctcgcagccgcgctcttgagtaacacgcacccgggaatgggaagtagcactacaagtgccgtcacttcccctaatatcaccgtcacattcactacgtcgataaatacccccaataacgttacttccaccgtcaccaccacggtacaaacctctactttcacgtccggctctacctccacgtccgcctctacctccgtggcaaccacgacgcagaaagaggggcacctgtataatgtgaattgcgaagccagctacagctacgaccaggtgtctctgaacgccacctgcaaagttaacctgttgaacaacaccaaaaatccagacattttatcagttacctgttatgcacggacaaactgcaaaggtcctttcactcaggtggggtatcttagcgctttcccctccgacgataaaggtaagtagcacctacctttccgtctattccccttcctcccccgctaacctgacatcaaaataaacagtttatgaattttatccacaggaaaactacatctgtcctacaatgccacggctcaagagctgcttatctcgggactcagaccgcaggagaccactgagtacacgtgctctttcttcagctggggccgccatcacaacgccacttgggaccttttcacctatcccatctacgccgtgtacgggactcgcttgaacgccaccacgatgcgggtccgcgtgctgcttcaggaacacgaacactgcttgctcaacggtagcagcctctatcaccccaacagcaccgtgcatctgcatcaaggcaaccagctcattccgccgtggaatattagtaacgtgacgtataacggacaacggttacgcgagtttgtcttctacctcaacggcacgtatactgtcgtgcgtctccacgttcagatcgcgggccgaagttttaccaccacctacgtgtttatcaagagcgacccgctgttcgaagaccggctgctggcctacggcgtgctggctttcctggtgttcatggtgattattcttttgtacgtgacctacatgctggcgcgccggcgggactggtcctataagagactggaggagcctgttgaggaaaagaaacacccggtgccctacttcaagcagtggtagggcctgagaagagaggagcggctgctgtgttgtctttatttcgttgacttttacggggttttccctcagcctctgtgttcccaacgcgtccccccgctgagcgttggcggcgatggtcatgttctcccaggaccacgtccagatcgtctacggctccacacgcatctgcaagtccctggccccggccaacaagagaaagacccatcgcaccatcgtggtagcgccacggcggggttttttgcgtattcccccggacgggcaggacgtcaaccacgtcaagatcgtacccaccaccacctcctcttccctcgcgccgccccgtgacgacgagcggcggccgaccccgccgttgcggccgccgctcacaatctatccctatggcacgtcgctgatccgcaggtcagctagggacgcaaaactccgctccaagctaatcgtcttccatataactcggcccgcactcggtcagcacccgcagaatcccgggatctcgggccctgcggccatggatcatagtgagttcctcaccagctttcgtcgcgaggtcgatcggcaaaccgtactgaccgccgagagcgcgcccgccactgtggaagtctgtctgggcgacgctctgcccggcggcgtcacgggtggcggaggactgccggcgggtgtgggctcggccagcgccgccgtggccgccgctgccgccgctgtggccggagtgcccgtcgccgcaaaccccgtcatgcccgccaccgccacggtcaccacgccgcccatgatcgaccttaccagccaccaccggccgctgacgctgtttacgccggcctccgcggccgctgcgcccgccgtggccaccaacggcggtaacgccacctacattttgccggccgactgtcggtacgcgccactctttgccaacaagtataagtacgtcttcgaagaggtgtcacgtctcatgcggctgcacgactccacggccgtgcagctgcagatcagcgcctcgtgcggcaacgctttccaagccctcaagagtgccctgctcaagttgcacaacgtcaccgtgttagcgggccagcagctcatcacgcagacgatgccgcacacgccacaggccgtagccacattcaaattctttcaccaggatcccaaccgcgttctggactgcatccgtccggtggtgccgcgctctacttcgtaccacgaaacgggtgtgtaccagatgtgggtctcgggcgccaccaagaaagacctgtttgacgccgtgaccctgtgcgcttccatcgtagaaaagcagccagacgtatttaatatcaacgtcagcttattgacgtacccttcgatcgcggcgccccacttgccactgtacaacgaattcaccagctttcgcctgcccacctcatgaagcggcggcggcgatggcggggctggttgcttttcctggccctgtgcttttgcttactgtgtgaagcggtggaaaccaacacgaccaccgttaccagtaccaccgctgccgccgccacgacaaacactaccgtcgccaccaccggtaccactactacctcccccaacgtcacttcaaccacgtccagcgccacgtcgaattcaatctccaccgctccagcgacgtcaacagtttctgaggcaaaaaacacaaggaataataccacaaccgtcggtacgaacgctacttccccctccccttctgtatccatacttaccaccgtgacaccggccgcaacttctaccacctccaacggggatgtaacatccgactacactccaacttttgacctggaaaacattaccaccacccgcgctcccacgcgtcctcccgcccaggacctgtgtagccataacctgtcaatcatcctgtacgaagaggaatctcagagcagcgtggacattgcggtgggtgaagaagagtcggagttggaagaggacgacgacgaagagtacgacgaactgtggttccccctctacttcgaggctgaatgcaacctaaattacacgctacaatacgtcaatcacagttgtgattacagcgtgcgccagtcgtctgtctcattccccccgtggcgagacatcgactcagttaccttcgtacccaggaacctctccaactgtagcgcccacggtctggccgtcatcgtcgtgggtaaccaaacctggtacgtgaatccgtttagcctggctcacctgctggatgcaatatataacgttttagggatcgaagacctgagcgccaactttcggcgccaactggctccttaccgtcacactctcatcgtgccgcagacttgatgtgccgccgcccggattgcggcttctctttctcacctggaccggtggtactgctgtggtgttgccttctgctgcccattgtttcctcagtcgccgtcagcgtcgctcctaccgccgccaagaaagtccccgcggagtgtcccgaactaacgcgccgatgcctgttgggtgaggtgtttcagggtgacaagtatgaaagttggctgcgtccgttggtaaatgttaccgggcgcgatggcccgctatcgcaacttatccgttaccgtcccgttacgccggaggccgccaactccgtgctgttggacgatgctttcctggacactctggccctgctgtacaacaatccggatcaattacgggccctgctgacgctgttgagctcggacacagcgccgcgctggatgacggtgatgcgcggctacagcgagtgcggcgatggctcgccggccgtgtacacgtgcgtggacgacctgtgccgcggctacgaccttacgcgactgtcatacgggcgcagcatcttcacggaacacgtgttaggcttcgagctggtgccaccgtctctctttaacgtggtggtggccatacgcaacgaagccacgcgtaccaaccgcgccgtgcgtctgcccgtgagcaccgctgccgcgcccgagggcatcacgctcttttacggcctgtacaacgcagtgaaggaattctgcctgcgtcaccagctggacccgccgctgctacgccacctagataaatactacgccggactgccgcccgagctgaagcagacgcgcgtcaacctgccggctcactcgcgctatggccctcaagcagtggatgctcgctaacattgctgataataaaggctctctgttaacccccgacgagcaggctcgcgtgttttgtctgagcgccgactggatccgcttcctcagcttgcccgaccacgacacggtgctgctgcgcgacacggtggcggcggtggagggcgcgcggcaactcgagatggtgtacccggcacccgagcacgtacaccgctggagctatctgtgtccgcccgagcaggtgcgcgtggtgatcgtgggccaggacccgtactgcgacggcagcgccagcggcctggccttcggcacgctggcgggccgactaccgccgccctccctcaacaacgtgtttcgcgaactggcacgtacggtggacgggtttcagcgcccggcctcgggttgcttggacgcctgggcgcgacgcggcgtgttgctgctcaacaccgtgttcaccgtggtgcacggacagcctggatctcaccgtcacttaggctggcagacgctgagtaaccatgtgatccggaggctgtcagagcgccgggagcatctggtgttcatgctgtggggcgccgacgcgcacacctgcgagtacctgatcgaccgacggcggcacttggtactcaagtcctgccacccgtcgccgcgcaacaccacccgcgccttcgtgggcaacgaccattttatattggccaacgcgtatctggacacgcattaccgagagaccatggactggcgactctgtgggtgattgatgataatagacacaccggggagacaaggtggtgaactgtgatgtctatctctttattgtaaaaaaaaatcagtaaccacaatatatatagacacacaccgaaaggggtggaaacccaaatgtccaagcgcgtcctgtttcatattttttccggtctcggctcggttttttaatcgtcgaaaaacgccgcgatcgaggcggcggcgatcgcagcttcctcgctgggatcgataatctcgagtccgtcctcgaggaacgagggccctcgccggcggccgctgccggcgacttgcgacaaccggagcagagggtcgttgtcctcctcgtcctcgtggcggttgtttctccgtcgcgatctccgagaggaggaggacgacgacgatgcggcctgccgccggctgtttctaccaccgccaccaccgccgcctcctcgggtattgttccgggcccgaccccgacgtccgcccggcggtggtggcggcggcggcagtggagcagaagaagacgaggaagagttactggcagccgcggcggtggcgacaacggggtttaccacgtagggcttgatttcacacacgggccggggaggagcagctggtgtttcgactgcggcggcaacgggcgcgacaccggcgacggaacctgagggtacaacaccggtggtgacgagtggcggacatgcggctgctggggggccaacgccggctgtggagacagctgcggcggtcctcgcgacgctgctgtggttgacgacgacagtcccgcccgacgtctctggcaagagtctgctggaaaccagggggagatcgcacaatcttttctccttacaatcattgagcattttggtcaatgactgtataatgtcatcaaaacgcggactgcgaggaggctgaggcgccgcggattcctgcgaattcggaggaacacggcagttagagactggagtggtggaatcattctcctcctccgactgcggtggtgcctccgccgcctcagccggagccctcctcatcctcctcatcatcattaaccccgcagccgccgccgtcgccgccgcctcggactcctgcaccgtctcgcccgcgctgtgggcgctgccgggtcgagggagcgaaagaagtgacgacggcgacgtcgacgacggcgacgaaaccaccgctccgcgctcaatgggtagaagtaacgcaccgtcggtgccggcggccacgtccgtcacggcgttatggtggtgatgatggtggtggtggttgttggaggaagaagagaccgcggaggatgaggacgagtaattgagaaaggccaccgcttcagacgtgtccagcggcagcgacatgcggccgctgccgccgccaccaccaccgccagcaccaccggactgctgctccgtctcgttcttgccgccgccgccatggccttcgtgctgtgcggtggtcttttgtctcttcgcctcccggaggggaggagagcctacagacgggacgacacatagcgcacgaaaaagcacatggttatcatccacacaaccaccagcgcaccaacaccgctcgcctgctcgctcgtgcgctacggggggctcacgagtccactcggaaagcaccgtgacgcgaagagggccgggactcaccgtcgttctcggaggagggaggcggccgccgctccttctgccggttcatcaaccggggatcccgcagcagtccgttggcggagtccgaggagtgctgaccgccgctcccgccgccgccaccgccaccaccagcgccgccgcctccaccaccaccggcagacgaggacgattttttgcgccgttcttcgtgacgctgttcctgccttcgccgttgctgttcctccgcagaagggccgtcgcgagtcccgccgctgccacccagcgaggacacgcagacggcggaggcagtagacgcggcgccgcaaccaccgcctccgctggaggattcgccgtggtttttcaggtaatgccgcacgtaagtcacttgcaaattaccgttctcggaaatcatagtgagcagcgcgctctcattgggtccgctggagcccaccaccgaggagacggatttgttaaagacgataccgccgcgtacaaagaggtgctcctgaagttccccgtcgcccgtaatgtcaatggacatgaagccctgctgcgtcttggcgccggccgaagcctcgccgtgctgcataatggtagcgcagagccagcccttgttgaggtgcagcaccttgccatcgccgtccacgcagttgaccagacgcgcggtatcaaagacgaactggcgcacgtcgaaagtctgattgacgctctgatgcaggatgcggttaggattcgcaaaagtccagtattttcgcacgacggtagtagggagatccatgacgcggcggcgcaaagcgcgagcgcaacgctcgtcggaggccgtggagcgagtgccgccgcagccggcagagcgccgaaccccgtcgcagactctatttatacatcatctttccagcccgcctagcaacacccacaaacaacgtcacgacgcaacgtggttaaacagtacgtttattaaagtaactgggtgaacgacaccggagcggactgcaaatcgcaacgctactttctcgagtgcagatactcctcgagacggctaaacaacgtgtccaactcgctgagacctttccgcgtgccgttatccgatttcctttccgcctcctgagacagccgactaatcacggacttatctccgcaacctaacagaggctgggagcccgacaaaagtaaaacagcgtgctatgaacacgttgttacctctgcgcggacagcgccgccacagagacacttacgcattgccgcatgtctttgtagatggattctagcgtcgagcgcatactatgcaattccgtcttgagtccgggatagacgtggtcgcctgcggggaacacgatctccagataccgccttaacaaccagtccatgacgctgcatccccaacagcctttgaccaccgtaccgtcgagccacacggagtagtcgtcctcacgttgctacaagaggaaaactacgtcacccgacacgcggaaaagaaagaccgtcacaataaaccgtacctacgtgacctaccaacgtaggttttactcgatgaaaggtgacgcggagatcttgcaatctggtcgcgtaatcctctggacgacactgcggctttgtattctttatcgtcgtcgtcgccggcttcgcctcctcggaagcgcctagaaaaaagacgattaggaccagagaggaagagaccatcaccgacagcatcgccgcagcatgctaccccagtccgccgcccaactgcgcgtcccaggtaggtggtcctttatgttatgatgtttttgtcaattttttttttttcaatttctttcttccgcggttagaatagtttctgtaggaaccaattatcaatctgacgggttatcgtcaccacttgatggcaaaacgaaatttttttttcattgccttgaagtctctcccgccaccaccaccaccaccaccgccgttgtctccggctggagatcaagacgaaattcctcctctctaaaaaaaaaggtggtgggctcaattgatcatggcaagaagaaaaactatactgaataaactgtgtgcaaaactactagtaacaacaaaaatagcgactagatacaccacggacaatctcagcagatactctctcaaaagaaaaaaagacgccgtaacgtcggagaatctggtatctactgcctgacgaatttttttttttcgtccatgtatgtgattacgagtagtagtggtatgtagaacaagaagaaaaatcgtagtccccaaaaggataataaaaataacactcatagagaatcacagattttctctagacaactctctatccaaataacgaatgtgaagcgtacaaagtaagatattcaaagaatagcaccttcatagattcatttcagctttctactccttgtaatttaaagttgcactaaacaaagctcttaaagaaggttcgagccgctctcgatcactcatcgatcacgcgagtcttattattccaccacaacgtaacattcttcactttgtagagacactttatcgtagagtaaccctcgatttcctagctgttgttttttgattattttgttcgctctaagagagatactcgaaatcctacttacaccaaggaccctacatcatcgcaggaagaataaacataccgtagaaatctcgacacgcaaacgcgaatgtacacgaaccaaaagccacagacccactatttctgtgccgtatttttttttgacaatctgtctgaatctgcggaaatagttacggagaagcaattctgttacaaaattcagtacgttagcagcaaaagataatcatttcgtgtgatagcaagtaaatcacctcacttaggatcgatttcgtgcgaaaaaattattttttctcctaatcaacagataatatggttaccatttagagtagtgtcactttactttcacggaagatgcaacccccgagaaaaagaagaatcgatcatagataaaagaaatcaagccagacttgttaagaaaaaaaaaagatcaaaaaattactacctaaaaagaacgcctagccattgggagacgcgcacgtctgtgtggtctccgcgatcatgagaacgaaaaaaaagacacgacaatacacaggctgacctttgaaaaccaagcctattgataataatctaccccatagaacaggatataatcaagcatccaaacaacaaacagcgccgccgtgcctcctccagaggacggtgacgacgtatgtctgtcgtctcccttctcgctctggcttctggggctctcctcctctccccatcatcttctccttcgtcccagacggacggctatcggttcgcgcgctcgtcttttcttcgatgtgcgcaggtttcgtcatcggagaagaagaccgcgaccgtatcataatgatgataataataatacattcaccgaccatctttatcctcttttgttgttccaaagagaaaagaaaaaaaaaacaagcagccactctaaccatcacactcacgagttaatatggggttaggggggaggaagagaaataccgccatgaaggcaagagcagcagcagcaacgacgtcactacgatgattgatgatgatacacgactaccactggaggagaggaaaacggagaaaactcatcgtgatgatggaaacaagaatgatgataataatgatgacgataaagccaccacacgatatatacagagaacaacaaaaccaccacgacgatgaaacaaaacgctcaaccaaacattgtgtaaccgctacgcgtccgtggccgcggccggcggcctcttgttttcgttgtccccttcgcgggggacatcatcgccgccaacccgcgtgtgccctgcctcacggctggtccgtgatgaactcttgctcgtaaccgccaagcgataaacaagccaccgtgatagaagacaccttataggaccatatcctagttacatagtagtgcatatatatagtaatagtagaataagtgaactttagacacgatagatgaagccatagtctgaatagtcatgatgttaggaacactatacgactagtacatacatacatacacccccttaggaggaacgatgaatcaaagaataatacatcatgtagcataagtacattaagcctttaaacgaacaaattgttaaccaaaatcgatcaccaccatagacgtactatcatcattacaacgaaaaactagacggatggatagctgtaagtctcacctagctaactaacgatcacattttttctccacgatatagtcaccacaaccatgaatgatagccgcctatttgaagtttgatatctcgacgaatctctatagtcatagcccgttctttttttccaagtatcctttagtccataagcattattataaccgtattacccagaaatctttgttatgagtctcttcgctgtcaactgattagtagcaagttgctgtgattttttttccaatcccataggcatccttagttaaaacattaagaagtaagtaggttctggatagctaatcatcttttttttttttacttcggtagattaaaacaaatgaaacacgtagctgttgttttttggtgaatatagtttggtaagtccttagcgggtaagttctaagaaacattagttactttttattgttctgtctcctctccccctaccttacgttgggaggtagcttcgtcatgtaggataataattaggtaagcaaacaacatagatagtgattttagtatagacaactcgtgtaagtgttttagtgacttgtaactcgactcggtagacttctcagagtttcgcctcacacaggcgggtacactcgttaagaaacgcaaaatacctaaaagggtacgttacatagcagataagttgatagatgaccgatattatacttcattaactcacgaagatgactgtaagtaaggatattgttgttcatgatagtagccaggttataaggatcatatatatctcgtcagggaaatacaagttagaccataatgttgactactttagagataataagacaccataggattctgaatttaccatgatataagttaagaagattgatatctgtcctttttttgaaacgaagataggcctttttattttttcgaattcatgttcgaaaacacaagcttccataacaagaacccgtaccgaagaaaagttccatcgactaaaaagaaaaaagaaaacgaagcaagacctcgacgacaacaacacatcaaagaaagacgaccagctgattatgttcttaggaattccacacacccgcgagccgatccgcaaacgtcgtgcgaggcgcgctttctctggctcgacacaatgatcacaccgcacgctatagacacgtcgtcgtggacgacgatgacctcaggccacgaatgacaaccaacatgggcaaagtccaattagccaaaaagacgacgattctaagaattgatgaatcctcgatatacgcctatcgataggtttcaattgtgtcatatacatcaaatgaaaaacaggacgcacgataaaagcttccttacagcataactgtaacatacgatcatcgaacatctcctcacatacctttctcctctcacataggaaaacaaaactctttttttttctttcctgtcaaggaaaaaatcaatgtaccaccacatcactttctgctcggtcccggcgacggatgggcgcgcacgcggacaaagacccaccggccacttccacttattttttgttgttaatcgtcttctcccccgcacgcggagcaccaccaagcctagctgctcattcgctcaaccagtcacaccgcgcacgcgagaaggggccggggtccgcgggcaccgccgccggaggcgcggttccctctctctaattccctggaaaacaagtaatgacaaacaaaaagacgacaaaaggtctctattctgctacatgagagaaattatagctgttggcaatttttcaaaatacatgttataaggcatcctctctgccacacgcgcagtcacggataggatcagtgcgtattcattataaaaaaaacacaaacaacccatatatgtgaagcagaatgatgaccgaccacacggagcgacgccgtcgactgacccacgcggcatgtacgccgtccgcgaacaaccaaaggacgacccgtctccccccgcacccgggttttttctcttggtcgaacccggcttgcgacgacgggttgttcctttaccggacgacggtcagccgcggggttgatacccagcgacggcgtcgctcccacccgggtttcttctcttgcaggtaccactcgtagactgtcagcctcgcgaggagacaccgcggaccagggaaacggataagtttacgaacagaaatcacaagagaaatacgctgacccgataagtaccgtaacggagacacggtggtttttattgaatttccagtgtatcgagccaccgtgatgcaggtacggcggttttatgtaaagtgccgctatctataggcgatgtgttccctgacggtgtgtgtttttttggggatagacaacgtggttcttgtacgtggtttttaccctgctcaataaagtcacgttttcattacacggtgttgtgtcaaaaaataagcgtggtgcgtttgtctttgagcgcgcgacagatatagggggtgatggcggtgttcttctcatagggcagtcgcaacgggttaacgttcatcatgaggtgctcggggtccgtgactcgcgacatggccacgtagatgtggctcatcttgaggttcttgggatggtccccaaagtccacggccaccttctcgagcgacaggccctgactcttggcgatggtcatggccgtgcgcgaagtgaggccgtagtccacggtggtgcacacgtgcagactcttgccctgcgccgactcgacgaagcgcgaaacgttaacgtcgagcacaaagaggaacccgagcgcatcgcgtagcaccagccgcgaaaggccgcgctgcaccacctcggggtggatgcggtggcggtcactgggcagactgagcacgttgtcgctggtgtagccctcgagcgtgtacgtctgcgccggcgacacatgcgaaagcatgcccacgaaggagccggtctgcgagctgatctgacagttggccttgaacaccacgttacggcgattgtaggtaacgagcggcaacgtggcgaagcgaccgcccgtgagacgctgcatgagctggtagcgcttgagaaaaatgtcgcggaaggtagtgtacatgtgcaccgtctcctcgaaagaaagcagcgccaggctaggtggcttgacgtatttgagaaaaaagggatccgcgtacagactggtgtgatccatgagttcggcgtccgtgacggcgtccgagtcgtcatggtggttggacaggcaggggatgtcgtgggtctcctcttggccatgttccatccgttgagataccggcacgctctggccgccctgagaagaatccgcgtcgacgtgattatttatcggattctctcccccgctccaagcgggagcggcggccgtggcggcggcagcggcgcagagcgaactcacgtcgggcagctcaacgcgcgccagctcacgcaacatctcctcggtcgtgtagggcgacacgtagaagtagtacatggccgagaagagcaggcccgaaactaacgagtaggcgtaggccgcctgctcgcagggcgtgcgttcgataaacgtgtccttttgcaagatgtccacgaaacgttcgaccgtgccctggtatccgataacacaggcccgcaccttagagttgactcccaccgaactgcccttgatgtaggtaatgcgcaaggtgagcagcgtctcacggctatcgggcgcggtggtggtatcatcgtcctggaaaaacgccgtctcgtcgttgccgccggtgctcccgattacagatcctccccctccgtgagcctggacggaggagttgttggtggcaacgacgtcggccgcggggcgcagcgcctccttggtgatctcgctggagaggttgtggtcgacaaactgcgagtagttaatgatgcgcgccaagttctggcggaaccagagctcgacgggctgcggcgagtcgcccagcgggtcggccagctcgcagagctcctggtacgcgcggttgttgaccacgcagtagacgggcagatcaaagagacggtggcgctcgctcaggcggatctgctcgtgcagccgcttgaagtaagcctgcacctcgacgtgcgagagaaaaagccgcgtcatctcggcggcgtacgatgggttgcggatggagctgggcggccgcacgaagcggtccacgtaggccacgtgctcctccttgagcgggataccgaactccatgtacttgagcaggtcgccaaagtccaggtcggtgcaacgcttgttgtgaataaacatgacccagttgtcggcgatgtcgcagtagttgatgagcacctcgttctgaatcagcgccgagagcacgtcaacgcccttgcgcacgctcttgttttgcgtgtagtggtcgtagcggctctccagcgcctcggtctgcgtgggcgaaccgacgcagatgatgcagggcacgcggcgttcgcggtaaagtcgcgtgtcgcccagggcgttgtaaaagtagtaaaaaaacaccaccacctgcagcatgtagcgcagcataaggccgcactcgtcgatgacgatgatattgctctcgcacagctccgagaggtcctcgcaggcggcggctgcggccgcggcggaggccgaagcggccttgcgctcccacatatttaagcatttgtccacgatgtcggcgatgaccggccagtaggcgagcagatcgttgatctgcaggcgctggatggtggtctcctcgtgcggctcgcacacgcggtagcgttccagcgtctcgtggctaacggcgctgtcagccagcggcacgtgcttgctgacgaagccgaagacgcggtagatggtcttgacctgcgccgagcgagtgcggttgaggatcgcgctgaggttctgcgcggcgatcaccgtggtaccggtgatcacgcaatctagattggccgccagcacctggatgctggaagtcttgccggcgcccgccgtgccggtgacgagcagcgcgcggaagggaaagaagggccaacggtcgacgcagggcacgcgcgtgccgccggcctcggacgaagcggcagcggcggcagaagaggaggcggaggagtgaacggtcgtcgttgccgcggcggtagttgcggcagaggggttgttatctgtcgttcgttcaacgcgactgatggagcgaaaccactggaacgaaaaatcctcgggcgcaaagcgctcgcgcgagagggacttgaccttgtcgacgatccgttcgatcttggcggccgacgagaggttgaggatcaaggcgtcgtcgtacttgggcgtgggccgcggcgtggatgacgaggccgtcatcgacattttccccacggggcagacgatgagcttcctgcggttgctgcacggctttctggggacgtgtcgcgggcaaagcatgcaccaggtgctgcgcgacccgtgcgtactgcgcaagcagctgctctacggagtgtgcaaaacgctctttgacaccatcacggtgcggcgcgtggccgaggagtggaagttgcacgcggcgctatttccctaccgcgcgctggacgaagaggacctggagcagtatctgttggtgtggagcgcctcgttgcgccagagcgtgcaaacgggcgtgctgggcgcgctccgcgacattttatatcagtacgccgataacgacgactatggtctctacgtggattggtgcgtaacggtgggactggtaccgctgctggacgtgaagaccaagccgagcgaggcggccgagcgggcgcaatttgtacgcgcggccgtgcagcgggccaccgagacacacccgctggcgcaggacctgctgcaggctaacctggcgctgctgctgcaggtggccgagcgcctgggcgccgtgcgcgtagccaacgcgcccgaggtacgcgtcttcaagaaggtgcgctcggagcggctggaggcgcagctgcgcggcaagcacatccgcttgtacgtggcggccgaaccgctggcttatgagcgcgacaagctgctgttcaccacgccggtggcacacctgcacgaggagattctgcgctacgacgggctctgccgccaccaaaagatctgccagttgctcaatacctttcctgtgaaagtggtgaccgccagccgccacgagctcaactgcaagaagctggtggagatgatggagcagcacgaccggggcagcgacgccaaaaagtccattatgaagtttttgcttaacgtctcggacagcaaatcgcgcatcggcatcgaggacagcgtcgagtcctttctgcaggacctgaccccctcgctggtggaccaaaaccgtctactacccgcgcgtggtccgggcggacccggcgtggtgggacccggcggcgccgtggtgggaggacccgcgggccacgtcgggctgctgccgccgccacccggcccggcggcgcccgagcgggacatccgcgacctgtttaagaagcaggttatcaagtgcctggaggagcagatccagtcgcaggtggacgagatccaggacctgcgcacgcttaaccagacctgggagaatcgcgtgcgcgaactgcgcgacctgctcacgcgctacgcctcgcgccgcgaggactccatgagcctgggcgcgcgcgacgccgaactctaccacctgcccgtgttggaggccgtgcgcaaggcgcgcgacgcggcgcccttccgtccgctggcggtggaagacaaccgcctggtggccaacagcttcttctcgcagttcgtgcccggcaccgagtcgctggaacgcttcctcacgcagttgtgggaaaacgagtatttccgtacctttcgcctacggcgtctggtcacgcatcaaggggccgaagaggccatcgtctactccaattacacggtagagcgcgtgaccctgccctatctgtgtcacatcctggcgctgggcacgctggaccccgtacccgaggcctacctgcagctctccttcggcgagatcgtggccgccgcctacgacgacagcaagttttgccgatacgtggagctgatttgcagccgcgagaaggcgcgtcggcgccaaatgagccgcgaagcggcgggcggagtgccagaaaggggaactgcctcgagcggcggcccaggaacgcttgaaaggtccgcgccgcgccgcttgatcacggcagacgaggagcggcgcggcccagagcgtgtcggccgatttcgaaatggaggccctgatgatccgcggcgtgctggaggtccatacggatttcactagacagaatgtgatgatcatggagccgcaagtgctcgactttacggtgcgcggcgacaagctgtggctgcacacggagcacgggctgctggtttccatggccgagtaccgcagcgagttgctgtgcacctcggcctttctaggctactccgccgtgtttttgctcgagaccgaagacgccgtcacgcaggtgaggctctcggatctgcggctcaaacaccgctgcggcatcgtcaaagccgacaacctgctgcacttcgcgctctgtaccgttatttcgtgcgtggaaaattgcaacttaacgcgcaagtgcctgcacgacctgctccagtatctggacgcggtgaacgtgcgcgaaagcttcggccggctgctgcaccacagcgcccggcggctgatctgcagcgcgctctacctactctttgaggaaaaagagccgcatattgtgcagtacgtgcccgctaccttcgtgctcttccagcagacgcggcatacctgcctgcagctggtagcacgcttctttttccgccttaccggtcaggacgaggcacactcgttcagcctcaagctgaccgagcgtaagaccgtggacggttggcccgtgggcctgggcctgctagacgtgctcaacgccaactaccccaatttaccctcaccccccaagctgccgccgcgctgggaacgaggagaggaagagtgagaagcgaactagacacgcatatcatagaataaaaaaaacacgcaacacgtagtgagctttgacgtcccttttactagtatccacgtcacacgctaagagctttgacgcacttttttttactagtatccacgtcacttacccacgtagttcccctacgtgactcgttaagcgttgagccggaaaaaccgcaggccctcggaagccacccgcttagcggcgtgttgcgcgtcaaccgccagcgagcgcacccactcgtcgcgctcctcgagccaagtcgccgacgaagaagaacaagacggaggagacaccgtcgccgtgcccgaagaggacgaagtgacggacggcaaggcggaggagagaacggaagaagaagaacaagcggtggtggaagcggtggaggacgacaataactctcgcgcccagacctccacgcaagccgtgagcatggcaaaggccttgtccacatagacgccgtagccgatatcggccgccaacgccgtatcgcgtgactgtacgatgatctggccctgctcggcccacacgccgtggaagggcgcgcagtcaatcaccccggcgtgcggccttacttcgttttcaccgggctggaagcgcagtaaccaaaagtccacgtcgttgcggcgagccacgaagcgaaagaggatctcgcggtacacggcttccagctcggacacgctcacgcgctcccgtaacagcgccggcagccggcccaagacatgacccacggccgagagccagtcgccaccggccgcgcagcaacagccacccaacgccgcgggcggcgtggagggagaaacccgatcactaccgccgttatgaccactcccggcagcggcatctagaccgccgccactcgcgtggtccgcgtcgcccacgccactaccaccgccgccgctagaatggcggtgagtgacgacgcagcccgcgcaacaagcgccgccgcaatgtcccgccgcgaaaccacccaccaccccgtggagcggactaccaccggcgccgccgttgccgtagaagaagttgaagggacccaccaaccgctcgtcgccccagaccaacagcacgccgggcgcgctctcttgaacacgacaggtgggacctggatcgtcgccgccaaaaagtttgcgccaataacagtcgaccacagtccgcacgcacacttcggccgagacgggtccgtgacccgaatagccgtcgtagacataaaactcgcggtggccgcgcgacagaacccacaaaaggccggccgaagcgcaggctgacgtaacgtgctcggagatgtagcccagcagactctggatctgccagaaggcgcgtcgcgagcgaaaacgcagattttcaataaacttttcacaaaccgcataagtgtggagtcgatgactataacgcacgtagggattgaagtcgcgcgcgcgtacacacttggccagcacgcgctcgaccaaatccacgatgagcactcgatgtagcgtggcgtcgcgaacgtgcacggtgaaagtggcgtcgtcgctcggcgggtgcgcaccgccggtgctgctgctgacttccacgacgttgttttcaccgtcgccgtcgtcacgcggcagcggcggcaacagccagcgacgatcgccgccggccggtcgctcgcgaaaagccgtggcattgagacgcacggcgccgccgccggcctcggtgccgaagacctgccactcatcctcgggcacgccgagcgagagcgcgcagggttccacctccagcttgccggccgagcccacgatgtcgggcaggccgcaccacgagagcacctcagccgccgcgtccaacgccgtctcgcgcattaacgtgtgcagaccgtggaccgcgtagacgggcacgggcgggaaaccgggaaaaaagaaagaacgggcagcgcccgtctcaaagaggtccggccccaggtagtcgcgtagcggcggctgcccagcgaaaccacgaaaaagcacgtcgtaaaggtgagtccaggccgactgcagcaataaacaacactgctcatcggtcactgccacggccacgaaaccgacgggcgtgaccagacgcagacaggtgcgcaaaaaacacacctcgcgcacctcaaagaggcgtgccaggacggcctcgtcgtcgcgctccagcacatacttgtgagtgccgacgcgaaacgacatggccaaatcgtaggcgtagtaaccgcgacgcaattttttgtgcgcgtgggtgccatactcttcggagacgcgttccgcggcatgcgtgaccacacgcggctcgtgcacttcgggatacgagccgatgaccactaacttggctacgtggaaaagactaagcgcgttcgacagcgctgcggtttccacgcccaatgccggcgcggcctccaagatctccacgccgctagcgtccgtctgaatctgcaccggcgtgaaggtgcgcgccaacacgcggattaacgcgctgccttctagcaacacgcgcgccaacacggcgctacgctgctctaggccgcgccggcgctcgtcggcgtccgtagtcacggccgaggccagcgcggcgtagctggcgcgatgcacagcacgcacctcagccggcggcagacggtcaccgcgcaccacgaacgtgtgaagccgcggttcggcacggccgccacccagatccaaaaacagacattgtacgatgggcaccgaggcctccagaaggccgtaccagctgagatgacagctggtcccgaacagggtgtacgggtggtggcggtggtgcagcggcggctgagcggtcatcctcggacagaagagagtcgcgaaggcccgcggggtcttttttcgccgaccgcccggacgcgctcaaaccgcgtcgtgagccgcggcggctcccatcgtagtatttaacgacccgcgagcctgtcgtcatcggcgcgcccccatcgcctcccgagcgagcgggccgccgctatcgccatggccccctcgcacgtggataaggtgaatacacggacatggagcgcttctatcgttttcatggtgctgacttttgtcaacgtcagcgtgcatctggtgctgagcaattttccgcacctgggctacccctgcgtctactatcacgtcgtggactttgaaaggctcaacatgtcggcctacaacgtaatgcacctgcacacgcctatgcttttcttagactcggtgcagctggtgtgctacgccgtgttcatgcagctcgtctttttagccgtgaccatctactacctggtatgctggatcaagatcagcatgcgcaaggacaaaggcatgagcctaaaccagtcgacacgcgacatctcgtacatgggcgacagcctcacagccttccttttcatcctcagcatggacacattccaactattcacactgaccatgtcatttcggctgcccagcatgatcgccttcatggccgccgtgcactttttctgcctgaccattttcaacgtgagcatggtcacgcagtaccgcagctacaaacgctcgctctttttcttctcgcgtctgcaccccaagctcaaaggtacggtgcagttccgcacgctcatcgtcaacctggtggaggtagcgcttggtttcaacaccaccgtggtagccatggccctatgctacggcttcggaaacaactttttcgtgcgtacaggccacatggtgttagccgtcttcgtggtctacgctatcatctccatcatctactttttactgatcgaggccgtcttttttcaatacgtcaaggtgcaattcggctaccacctgggcgccttctttggactctgcggcctcatctaccccatcgtgcagtacgataccttcctcagcaacgaataccgcaccggcatcagctggtcgttcggcatgctctttttcatatgggccatgtttacgacgtgtcgcgccgtccgctactttcgcggacgcggtagcggtagtgtcaagtaccaggcgctggccacagcctccggcgaagaagtcgctgcgctcagtcaccacgacagcttggaaagccgtcgcctccgcgaacaagaggacgacgacgacgatgatgaagacttcgaggacgcttgaccccgccgccacccgcaccagacttggagacatggacataaaaaagagacacgcagaccgtgggtcgggagcacatacttttttttttattaaaggtttatctgttcttccaccagctactttacgtgtttcaaacagcacattagacacacgggggcgcaaacacacacacaaaaaaaataatatacacacggagaaacacccacgggtgtcccattcccgactcgcgaatcgtacgcgagacctgaaagtttatgggttaaaagggcaaggaggcggcgggcttttttgtcccgggggtgggtggacgttgtgaaatcttcttttggcgcggagtcctgggtgtgtcgggccgcggcagtcgcttagccaccacctggacgggggggaccgggggcggggacaggtaaattgaggtgtcctcttcgtctaggtcgtccgtctcctgcataatggagctttgctgatggtggtgacgttttgagggtttctttttcttttttgactgcttgctcggtttcggagccttgtcctcgcgaaacgtcgagcgcaccgcgtttttcttggagccgtcgtgggcggcctcgcggtggctgccgctactactgtcgtttcccccgcagctactaccgcagagccgcagcttctgttgccgctcctcgttatcgtcatcctccccgtcgtcatcgtcctccccttcgtccgaggaggaagtcggagggatgttgtcgtaggagcgtagagacacctggcgacccagagcatctttcaggggctcaccgggcgtggtaccgaactcacaacatattcgtttgcagagttcggcacccatatcggtaggttcgtcttgcgggacaggtcgcgactccaacggtctagcacggtagagacggcatggcgcgtaaactgagggtcaaagaccacgggcgtgacgatgagcaggagcgggatgtggtcgcagtggaaaacgcgaccgccggccagcaactcgcagcccagttcgctttcctcgcgctcgcggaagatggccgagaccaggtagacggtaggcaggtcgcggaaatcgatccgctccgggtccggatgcttctttatatagtattggctgagcacgtactgctgaatgagcatctgaaagtaatactggtgacgcggattgacaaaagccggcagtgaaaagcgcgctacctcgtacacgttgagccggcccagcagctcgggcgtgttttcgtcctcgaaaggtatcggcggcggcgaatcgcccgggctgccccgcaggtggtgatcagcgccgccgccagcggcgtcgcccgcggctaggccgagactcgcgttaatagtggtcgtggcgtccccgtcgctgttgtcgtcattcaggtgcttggcgtcaaacacgatcacttccgaacactcggccttattgagatacagcagatcggccaggtactcgcgcagcggttcgggcggcttgagcgggcgcgcgcgcttgagcgtggccctgaagagcgccgcgtcgtgcgaaagcagaaactcgcgtgccgacggggtctcgcgttcaccgcgaaactccacgcccggcaccgggtgtgactgcaacagcgaggccacggccgccgcgtcgtgcctccgcagcacgttctgcacaaaggggtcctcctttttgcgcaaatatttgtagcggcacttgatctcgtagacgcgcgcgcacggttccaccagcaaggtgcgaccgctgccctgcttgagcacgccgaagcacaggtccatggaagcgcccagcagccccgacgtggggtcgatgagcagaccgaggccgtcgcgcaccggctcgcgcccgtgcatcacgtaacattccaccagcgttttgactaagccctcgtgtttgataccgaactggatgcccggcgagacgccggcgcgcgagcccgtgtagtgcgagccgccgccacccgaaccgtccgccgccgcggcgccgggcagacagccgctgacgaaggcctcgtagaacttggtggccgagaccgtgtccatacgcaacagatgccacaccgagttgcgcgactgtccgcgcgattccttttccagcaactggaagagctcgacctgtcgatagttgggcgccaaatccagcaaccggctgagccacacgtagtcgtccgagccgccgtgccggtcgtcgcaccgctcggccacgcgctccagggcctcggcgatctcggcgcgcgaggcttcggcggcgtgccgctgacccaaaatgtcgcgcagaccctcgtcgcgagccagcgcggccacgcgcgtcataaagtcctcggctactggcgtaccgtgggcccgcaacatcttggcgaagatgcggtaggcgtaagacagacgcagcaccgtaaagggcagattacggaagccctcctggtgcagcaaaaaggtgttcataagaaagagactgaggggctcatcgtcccaaaccgccagcagccgggtgagctcctcatcgtcgtcgtagtccaaactcgagacgccccacatgatgatggcggcgcctcggtattttccccgccggtgggtttgtaccttctctgtcacctttcccctcagcaaccgtcacgttccgcgtcccggttactcggggaacagttggcggcagtcaccgtcaaggtcctcctcgcagattatgctggtagtgcgccgaaaggcgttatataaatacagcccgtcgctcgtggccaacagacgctccacgttctttctgacgtattcgtgcagcatggtctgcgagcattcgtggtagaagcggcgaaaggcgcgtacgcgacacgaggacatcttggcctccacaaagcgcagcgtgtgcgacaccagcgcggcgccatgctcgcccaggagacaggcgccgtagctcatttgcgccgccagaatgagcagacaggcgtcggagcagtgcgtgagcttgccgttctccaacgcgcggcaggccgcgccggcgtgcttaaagagcaacgcctccgtgcccatgcgcacctcgtccagaccgcgccggtccaacagccgcatgaggcaaaagcccagcacgttgcccagcgccgacagctccgacatgcaataacgccgtaggccggctacggggaaacgcgcgtgcgggtcgcagatgagcagcttctgcagcggcatgggtcggaaagcagggtggtaacattcgcgcagacggtgcgagcagttggggatgcggcgcgccgtgcccgtctcctgaaagacggccacacagcgctcgttgtaatccggatagggctcgctgaggctgtaatcgcacagcgcggcgcgcacgatctcgctggggttgtgcgggttcacgtcgatgagcacgttcatgggtgtaatgtcaaagtggcatacacgacactggtgattgagaaatttgatagcgtcggccaacgtgcaaaaggcacgtcggtagctgtcgatgcacgccagcttccactggtcgtgatgaaacatgtctgtgtggaaacgtcgatgtaccgtgacgttgtgcagcagacagcagcccgtggccgtgagcagaccgcggtgcacgcccgtgcccaccagcgacggcggctgctgttgctcgccagcggcgcgcgtgcggatcagacccgacatccagaccgtaagcaccgtctcgctgtgcttacgcgccaccttgaccacgcgatagcgatcgagcggccagacctcgccgaaggagccctggcccaggcggtagctctcgtcgctcatgtccacggcataacagatcttgtggcaaaaatcgtcctctttgggcacgtagaccagcaggtaggagatagagagttcgcagagctcgggatgcgtaaggcgcaagaacatacgcgggtcgcatgtaaggccgcggatggacgtggtgatgatctggtcgttggaacaggtgcaatgcacgtcgtcgtgcgacgtggagtcggcctccaccgccgtggcggattcctccccggaactaccgctgagcgactgcggaacgcggcccgggcccgatgccacggcgctgtcctgactttccgcgcgcagctccacgtcgttttcttcgagcaccgcgtccacgccgcccacacgacgtcggcacagcggggtgcgggccagcgacaccaacggcggacgcaacgggcgtttgcgtccaccgcggacgccgctcacgctgtctgaggggtcgctgccgccggtgaagagagcgcggcgtacgctggtcacgtcgccgtcgcgatcgtactcgaacgaccacatggccgaggtttcgcggcagcgcaagccgtggtaaccgtcgccgctggcggcgctgccgcgagacgacgtggacggcaccacgggccgacgcaggttctccttgtccgaagccgcgtcctctttttctccgtcacgcatcacgtcacttcgaacgcatgcggaaaaagtcgcgtgtccaagcacggtggttgtgctgacggaactcagagtggtcaacgtggtgacgccaccgccggcctcgtcggccatcagatccacgacctcgtcttcatcgacgtgagcctgggcaacctgagcggcggcggcctgcgcggcctgcaccgcggcttgagcggcggcctgcgcagcttcgcgcatccactggcgccggcgcgccctgctgggacgacgcaatggcggcggatcccagccctgagtcgtcgttccgagcgaggccgagcgagcccgagaccgaagtgcggaggacatagtggcgacagtcttccctgttcctagggctgcactagctaccacaccgacactgtcgttatgttgtgttttttttttaataaaatctgaacagaggcgtgacggagattgctatacctgttagacggcgtcgtcgacctccaggtccaaatcgcacgtccccgaaaccgagtccaccaaggtggctctcacgtcgtctaccgtgtccttcagctcggttaaagagtccagcgcgtcgtccacgttaccggattgcagctgtcgggcgcgttgcaactcttgctgcacggccgcccgttgctccaacaggtgtgcggccacgcactgcgtcgttcgctgactgtatcgggtctgttcccgagcggccacacgcatcaccgtcaaagcctgctgcgtggtgagccggtgctgcggtccgtaggtacgccgcagaaactgatgctgctgtcgctcaaggtcgacgcgcatcacgtcctttaagagctgtttgttgaccgacgtcatagattcaacgtgatgagacccgcgtcgttcagcgagagagcgtccagcaacttgccgacgtggtagacggggaaaagcgagacggtgctctggccgggcaagatgtggctcaaagtgacgtcggtgacagccgcggcgcagtcttggataacgatggggctataactcacggtccgcgcctcgtcacgcgcgagatctaaacagagacggttctgactgtagagcgcgcacaacaaacaggtgcgcgacgaggccggccaggcgggcacctcgcgccccgagaagcggccgcgcaccgcctgcaacacctctctgagacggtccagcgagacgggctttaaaggcaaatgcacctcgtcgccggcgtcatcgacccggcctgctgacgcgctcgtctcgaccgcacaagcgccggccccgccgccgccaccactaccaccaccaccacccgccgtcgtcgcctgcggcgtcggcgcagggaattcgtagccgcgataccaaacaaagacgtacagctcagccagattcatgtaggtcatatagtcccgcacgggttcgtaaaagagtttgggcaacaacgcggggaaaggacaaccgttcttttcgcgaccgaaacaggtgtcacgcgcgcaaaagctgcgcggtccacagtacagcagccacagcagggcctccacgtcgcacacgttgtgatgatctaacaagcccggcgtgtacacctgtcgcagcacggcttccacgtgttgcaccttgttgctggagagtgacagctccacgtgagccttgcgatacaacatgtaactgccgtagattaattcgccgtcgtaggtaacacggtcagcattgcgtaacgcataatcacgcacacaaagcgacggcaaaggctcagccgcggccgcgaaacgctccagcacgtcgtgtcgacgtagaaaagacggcgtggcggcgtcgtttttcggagcgcgtcgtctacgacggcgtttggcccgagacccaccgtcgttcttttcccccgcggttttattcccgacgtttttctttttgtcctccggcccgctatcgccaccgccgctactgctatccaacaccggcacctcggccgactcgcgcggaatcacgttggtgaccaataagaaattctcgtcgggcgtttcaattaggcgaaagcgatcgtaaggtgacacggcctcgcaggccaccagcgccatatttacggcctcctcgaagcgccaagcctcggagaccgagaaatcggcggccggagactgcgccgacagctcgaccatccgttccaccgagcacagggacgttgaaaccccggcggaccccggagacctgacggcagttgagggggaggagacggggaaactgagaggagaggcggaggaagattcgtccgagcctgacgccgaggaagacgacaccactagggacgacgaagacgaacgagtgacggcgcccgtcccacaagccacgtccgcgacaacgtggttttcgggtagatcctccgtcgtcctcgcggccgccatctttttcctctcctctcgacgctgccgcctaacctccgctcgcaccaccgccgccgccatcatgttgcgcggagattcggccgccaagatccaggagcgctacgcggagctgcagaagcgcaagagccaccccacctcctgcatctccacggccttcaccaatgtggcggcgctgtgccgcaagcgctaccagatgatgcaccccgaactcgggctggcccactcgtgcaacgaggccttcctgccgctcatggccttctgcggccgccaccgcgactacaactcgcccgaggaaagccagcgcgagctgctgtttcacgagcgcctcaagagcgcgctcgatgaactgacgtttcgcccgtgctccgaggagcagcgcgcctcctaccagaagctggacgcgttgaccgagctctaccgcgatccgcagtttcagcagatcaacaacttcatgaccgactttaaaaagtggctcgacggcggcttcagtaccgccgtcgagggcgacgcaaaagccatccgactcgaaccgtttcaaaagaatttattgatacacgtcatcttttttatagccgtgaccaagatccccgtgctggccaatcgcgtgctgcagtacctcatccacgccttccagatcgacttcctctcgcagacctccatcgacatctttaagcagaaagccaccgtgttcctggtgccgcgacgtcacggcaagacttggttcatcatccccattatctcgtttctgcttaagcacatgatcggcatcagcatcggctacgtggcgcaccaaaagcacgtgtcgcagtttgtgctcaaagaggtcgagttccgctgccgccacaccttcgcgcgcgactacgtggtcgagaacaaggacaacgtgatcagcatcgaccaccgcggcgccaagagcacggcgctttttgccagttgctacaacaccaacgtgagtagctccatgatgataacatacgccttgccacaaaccgtggcgagtccatgtcctcctttctttgttgtttcttgtttcttctccccgtgaactgtcagaccccgttagtgcactaggttcttaagcaccggacaggaacatactatcatacgtgacacaggttcctctaccttgaccaggtcccacacatcggtcttgacgggcagccatcggccctcagaatccttaacaccgatgtgataatccaggccgtctcccagtgtgacctgcgccgcggtcttagaacctacggcgcataggtacttggcgtcatcgctctcacagaaaaaagtcgcgggttcctcgttgtggatgagcgactgcgtcatgggcccacagggcacgtaacaaagacaacggcccatatcgggggtgcaacccacgtaattgccagtgggatctacgtgtccctcgtgatccgtgcaaaagctgcaacccgcctgcccgcaggccgtggccgccgccatgaggcgcgtcatggaagggatatcgcaccgattgccgcatgaggtaaacaggtcgtaacacagaatgtaaaagaaaagcgtgtagccttcgggacgcggcagcaaccaggcgccggcgccgcctagcgtcactgccttctgacaggtcaggtccatggcaccgtgacccttgaccaggatacgcttggcttcatcctggggcaccaacatgcagacctcgtaaatcacgtcgggcgtaataccatcgcacgtcatactgctggtcacctggctaaagcttggcaagaaatcgatgctggctggacccaaaggacctccgaagctcagttggtacaaggtaggtagatgacagatgcgtcgacgacgccgatgtacgtgattcacgccatagtggccttgataacggccgttgcagcaaaaacagatgatccattcgccgtcgcggtagagcaacagcaactggcataagatacacgagctgtcgtcctccggactaaagatcgtcgaacggcaagcgacggcccgatactcgcggtgtttccggctcttgccgaccagcttccacatgcattcctcttgcaagaactgcttcaaagttctggaatcggtctcgcaaagcccgctgcgccaagccatgaagagtgacgcgcgagaacacagcaaagccgcccggcagcacccagtaaaagtccaagtctggcgtgacgtagagcacgcacacctcgggctgcgagagccaacgtcgcaggcgtccgcggcgatcacgaacgatccaaagcccggtgcgaggacaacgcgccgcgcgcacttccacgcccaaatccacttgcgcgcgaacgcagcgcaccacgtcagcgtaccaagtccgttcggcgggcggaccgctctcgttccgcggcccgaaaagcagctcctgcggtttgggcgccgggcgctcgcgctggcgacgagctcgctgagcggcagcggcggcaccccggctcagacgaggcgtcagcgccttaataatacagctacgcacgtccgcccgatccatccagagcaccaaggcatgacggcaaagttcccaaacaacgcgccaggacatgttccgtggcacgtggcaggcgaaacgctgtggcaacgcgccgccgtcccgtcgtagtacagcatagatctcgtcgcgcacggcgcgaatcagcacgtactcgacggcgatgcgcgcccgataagcgtccaacgcccggtatagttcgacttcgtggtcatcgtagctcagctcgcgattgcgccaaaaggaattgacgtaccacagcacacggaggcgcacgcgatgctgcacatcccaaacctcgcggagacgcgagacgccggcgcccttccactcgtccgtacgcgcgacctcgtcgcggtcgtgcggatcggtggcgtacatgaggtctggatttacgtccaggcgcagctgcaccaactcgtgaccgcgtatcttggaaggcggctccaatggacccgcgtgatagatgaattcctcgtcgccgcgcaacaaacgcgctacccgctgctccaggttactgaatctgccgccgccattcgcggaggaggttcctgctccgttcggaatttcgaaaaatggagtactgacggccgtctccaaagaagccatagccgtttcgggcaatcggcgatccgacccattgtctaaattgttacgcagtccgccccgccgacggtgattcgtggccgtggccaattggtgctgccggtcgcgcttgttcgcttccatttcttctcgtaacaggtcacgcgctaaaaattcccagtcacgatagctgccgtcgggccagaccagtctcaggtgtagcgtctgcgcgcctgagagccgattatcggggcagcgcagacccaacgtagtgaagacggcatagaacatgcgcacgcgctgctctttctctaacgtcacagtgagaccgctttgacgtaggtaatcgagcaactccagtgggcgcggtagtacacgaaaacaggcccgctgccaagtccgccgctcgcggtcaaaagcgcgatcgccgcccacggcgtcctcggcgtcgtcggaggccggtgcgtcgtcctcatctccacccggagcgcggcccgcggatcggccagcgctgtctacattacgatagtagacgtagcgcagcgtctcggcctcctcgttactcagcacctcctggtcgagcaccaggtgtagaggcaattgctcatcatcagcgaaccgcgcttcaaacgccagatccgaatacaggtgcgtttccatattcggaacgcatctgtttcagaagcgcgtcctcgcgtttcttacgactaaccttgatgacacacgcgtcgtacttggtctgctttgagtagataccgatgataagctgaataaaaagttggctgatgacgggcaccgaaatacggttgacgttatgcatagaacggaaaaccttattaaaggtgaagtaaatactgtcctccacctgctttttgaggcggtcgcgctcgaccacctcttggatcacgtcggcgtaacggccggcatgcgtcatgaggtagctgtacacgccgctgagcacggcgctgatgatgttgacgtcgtccagtgcggcctcctcgatgggttccaacaggtggctacgcgccaccggatagagagcctcgtataccaggcccgtcttgacgcagacggagccctcgagcgtggagacgagcgcgcagccgctgcccagatcacacaggtgcgtgcgaaagcagcgcgtgcacgcgtagagcgagtgtaactggatctcctcggtaaacgcgttctggacgtgcctcatgtcacaggcgcccgaggcgtcgcacatgacgtctgagcgccgctgacagttttgggggcggagggaataggagaagggcagggacgacaggtgttgcttgtctccgcgacgttcacgtccgggtgactgcaggcgtccaggatgtcgttgacgcactccaccgtcaggtgctcgaacacggacgcgaccagttccaagcggcgcgggcctgactcctcggcctggaaaaggaaggaaaagtgttgaaagaggcggtcgacaaagataaaaacatcctccgtagtggcgtgcgcgacccccagtcggttgagttccgccagcaacgagttcatggcggctgtggcgggtcgcgacgacgacactttcgtttttatgggcgcgcgtcacgcggcgccggtgtcggcggattggttccggttttcaggtcgcagcccggttggcacacggcgatcccgcctcacctggcggctcacctggctcacctgtccggccccaccccgactctgtaggcttccagccgagcgtgcgtaatcataagagtcccttttctgtctcctctctacacagagcatccgaggacaaaacttccacttgctgctggtggacgaggcgcacttcatcaagaaagaggccttcaacaccattctggggttcctggcacagaataccaccaagatcatcttcatatcgtccaccaacactaccagtgacgccacgtgtttcttgacgcgcctcaacaatgcgccctttgacatgctcaacgtggtctcttacgtgtgcgaagagcacctgcacagcttcacggagaagggcgacgccacggcctgtccttgctaccgactgcacaagcccaccttcatcagcctcaactcgcaggtgcgcaagacggccaacatgtttatgccgggcgccttcatggacgagatcatcggcggtaccaataagatctcgcaaaacaccgtgctcatcacggaccagagccgcgaagagttcgatattttgcgttacagcacactcaacaccaacgcctacgattatttcggcaagacgctctacgtatatctggacccggccttcaccaccaaccgcaaggcctcgggcacgggcgtggcggccgtaggcgcctaccgacaccagtttctcatttacggcctagagcatttctttttgcgcgacctctccgagagttctgaggtagccatcgccgagtgcgcggcgcacatgatcatctcggtgctgagcctacacccttacctggacgaactgcgtatcgccgtggagggcaacactaaccaggcggcggccgtgcgcatcgcctgcctcatccgacagagcgtgcagagtagcacgctcatccgcgtgctcttctaccacacgcccgaccagaaccacatcgaacagcccttctacctcatgggccgcgacaaggcgctggccgtagaacagttcatctcgcgtttcaactcgggctacatcaaagcctcgcaagagctcgtctcctacaccatcaagctgagccacgaccccatcgagtatcttctggagcagattcagaacctgcaccgcgtcacgctggccgaaggcacgacggcacgctactcggccaagcgccagaatcgtatctcggacgatcttatcatcgccgtcatcatggccacctacctgtgtgacgatatacacgccatccgtttcagggtcagctaggcacgcagcagagccaccaggtgccggcgactgacgccggcatcggcagaaacgagacgatcgtaacccaggcgcgtaaaactccccaagggcgaaaacgtttcggcgtagtcggctaacaaagcccgggccgccgccagcgtccgcgcctgcacgccgccgtgactgcgatagtaacggcgcagcaccacgttgacaaggtcgttctcctcgacgcgcggcggcggaggatccaaggcctccagcgcctcctggtgcaaatgcagcgaattgagcagcaaacatagacaggcggccagcttcatcgtcttgcgatgtagcagaaaaccgccgcttgcgcccgagacggcggcatcctcgggctttccggccaacatgcccagcatctcctcgcccatctcgtcctcgtccagctcgtaaagacagacttgacaaagaaaatagttctccagacgcggcacgtcgagcaagagcagcttcttagcacccgccagccccacgcagtgctccagcagacgggcggatgaacgcggaatattactcattcgcaaacggtgataagcgctggccaccacaccgtcaaacatgtccgaatcaccgcgcgtagcactctgcaacaacggcgctagacgctcctccatctcgggcggacaaagaaccagctcctcgtgcgagcgccgttccagcaaaaaaaaatattggcggaacgtgttcaccagggcgcgcgccgccgagattcgtcgctgcaccgtagtgatcacaacgtccggcgcccaaagcacgctggtacccggccaaataacgtgtctggggccggtgctgccgccgtcgttgacgcgaatcatataaatacccggcacgtcgtacagctcgtccctgctgtcgtcgtctccccggcgctcctcaccactcgcatcaccgtcgcgccaccgtagcctactactccccaactgaccgcattccaccaccaacttggcgcaatgggtaatgcccgtaagcgcgtacaccagatcgctatgcttctgccaatagatggaaaagacggacgacctgcggttaaaacgaccgctgcaataaaaacacagctcggaagcaaaaaccacgtcgtcttcggcgtcgggcggcggcggtaacacacggcgaatcagttgcgacagcggtccgttgcgaaacgcgtgctcgcgcaccgtaccgtcgtccattaacaacgccgcgtcgtgccaacccggcgtcggacgctcctccggacgaaacgccgcggcggcagcggccgcggcttccatcatcgtgatgcaaaccgcgctcgcggcgacgtgggttcagaactgccgtcaacgctgacggaggttgggacagaagtgacggaggaagatgaggacacacacaatgggggaggggatgaacacaggcccgatgtggctgcggccgtcgagcacaatcgaaacaacgtctggtggatcacttcgcgcgtgtgcggcgtaccgctgatactctgcaacgcgcccagcgcctcgactaacactttgaggcgcgtgcgagggatcttgtgggcttccacgtgccgacacaccgtcagcacgttggcgttccggcccaggtgatccaatttgacttttttgttccgggccaggatcttgggcacgttgttggctagacgactgccgatgagcgcacaagtgtgcttgatcttggtgtgcgccgtgaggttcttgctgtagtcaaagagaccccgctgtgccgcctcaaatactaggcggtccaactgcagccgcttctctcgaccgtgcagcttgagcaggcaagcacgcagaaacagcactaactgcttggccaggaaggggatctggtacgaattgcgcagctctagttgcgtgaaaacgcggtgcagaccgtaatcgatgcacacgtcgcgcatgttcttgatgcacgagagttctttgagcagaatggcttccaggtcagcgcccgagacgcgcggcacaatggccgtagccgctttgaaccagcccacgttgacgttgttagtatgcgagatcatgcacggaaagttggtggtccagtacaccttgctgcgctccgagcggatcaccgcctggtcttccagcccatgcacgtccagcgaggagttgctgttgcacaccacggccggcagaaagaagtgatcgatattaacgtgcagccggtacacgcccagcgagtacagaaactcgggataggaaccgcgaatattgacgttgagcgagttgatgtagacggcgtcgttggaaacaaaagtgctgacggtgcaagcgggctccttgaaggtgtgcttgtacatcacaaaactgtgggtcatgttcttgggaagccgcggcgcgcgcacgccgagacccgacgcggcgatggacgagagtgcggccttcatattgataacgcggttggtgttgaaagcgttgacggcgatgcggtccagactaacgcccgtcacctcggcaaactccatcccgccgatgagcttacgacggcacggcgcgtaacgctgcacggctagatgtttacgacgtcggtgttcctgataggcccggcgcagctgctgccccgtaaagtcaaatggcggcgtggcgtcagtctcccccgattccaccgtctcttcctcctcttctcccgtctccgaccgccgtcgacggtgtttacgccatctctccccataccgggcgaacatgagacgcgagataatgcacacgtaacgtcgaacgcgatctgcggccgggtcgcgcggcagcgacagcttgtgacccgcgctcgtcgtcgggagcgcggtggaagacagcgcgtgtccgttggctgaaaccaccgtcggttctgacggtggtagccgcgacgtcctcggagcgcaagaaacaccgtaaccgcggcttacggatcggtcctctgtcccatgggaccccagatcccgagctagttcataataaacgtagaaaaggtttctccacaccgtgtccgtgtcggcaaacgtgacgctaagacgtcgataacacagtaggttgtggtgtccctgacttccaccgtttccccctcccccacttctgtcagcgtggccagtccggcacttgccgtagctcacctgtaacttgaagtacagtacctgtcgcttgaagcgactgagaacgaaggtgctcaggtggcacaccgtctgctcgggcaagcgaagtgccatcatgacgcgggcgcggtcgcgatgcagctgagccagtacgcgaccgaaaaactccgacgtgacttcgtggtgatattcaacgcccagccaaagcttttgcagctccagcagaaaaaagtcgcgtgtagcgtccaacgcgcacggcgcttgcggacgcacgttgagtccaaagagcagcttgtagtgaacctgaatgcgcggcgccgcggcctcgcccaggtagccggagacggcggttacgtagtcgtctacctcactgacgctgagtacgcgtccgatttccaccatcaggtaaggatagtcgtccaggtgcaggctgaggtcgcgcggcaggcaggccatggcgtagcgttcgtcggttcccaaggcgccaccgccgccaggacagtcgcaaaaaaggcccggcaactctcgattccattccgtcagcgagagcaatccgcgtaacacatgcgttgccacgtggttttcgagaacgtggcaggacagcgcgcgcccggcggtcacggatccgcaacaacaacgtcggtgcacgtagagcagcggcccgcgacaaaactgcgtcgtgggtaccagatgctcgccgtggccctccacttcaccgtcgcaaaaacagggtacggccacgggtcccagcaacagacgacccagtaccagcttgacacgctcggactcggtcctcgcgtgtacgggacaggcacggtagagagccgcgaaaacagcgcgtacccgttcgacgttaacgggtcgcggacgacagaagcgggcgtcctcgcccgtcgatagctcttgggtgaggttgcaggcgcgaacgtgcacggggacgtgtaaaacccggcgcggcgtagcggagccgccgacgactattagagcgtcgcagccgaggcggcgcggcgcagcgccggccattctccgggtcgcgctgctttccccgagctccgacgcctcgcgctcacgccgccgccgcgatggagaactggtcggcgctcgagctcctgcctaaagtaggcattcccactgactttctgacgcacgtcaagaccagcgccggcgaggagatgttcgaggccttacgtatctactacggcgacgaccccgagcgttacaatattcacttcgaagccatcttcggcaccttctgcaatcgcctggaatgggtttattttttgaccagcggcttggccgcggcggcgcacgccatcaagttccacgacctcaataaactgactacgggcaaaatgctgttccacgtgcaggtgccgcgtgtggccagcggcgccggtttgcccaccagtcgtcagaccaccattatggtcaccaaatacagtgaaaaatcccccatcaccatccccttcgagctcagcgcagcctgcctcacgtatctgcgcgagacattcgagggcaccatcttggacaagatcctcaacgtggaagccatgcacacggtgctgcgcgcgcttaaaaacacggccgacgccatggagcgcggcttgattcacagctttttacagacactgctacgcaaggcgccgccgtactttgtggtgcagacgctggtagaaaacgccacactggcgcgacaggcactgaaccgcatccagcgaagcaacatcttgcagagcttcaaggccaaaatgctggccacgctctttttgctgaatcgcacgcgcgatcgcgactatgtgctcaagttcctcacgcgtctggccgaagcggccaccgatagcatcctagacaaccccaccacgtacaccacgagctcgggggccaaggtcagcggcgtgatggtaagcacggccaacgttatgcaaatcattatgtcgctgctctcaagccacatcaccaaagagacggtctcggcgccggccacctacggcaactttgtgctcagtcccgaaaacgccgtcaccgccatttcctatcactcgatcctggccgatttcaactcatacaaggcccatctgacttcgggtcaaccgcatctgcccaacgactcgctttcgcaggccggggcgcacagcctaacgccgctaagcatggacgtgattcgactgggcgaaaaaacggtgattatggaaaacttgcggcgcgtctacaaaaacaccgataccaaagatccgctagaacgtaacgtggacctgacgtttttcttccccgtagggctgtatctgcccgaggatcgcggttacaccacggtggaaagcaaagttaagctcaacgacaccgtccgcaacgcgctgcccaccacggcctacctgctaaaccgggaccgtgccgtgcaaaagatagactttgtggacgcgcttaagacgctgtgccacccagtgctgcacgagcccgcgccctgtctgcaggccttcacggaacgcggaccgccctcggaacccgccatgcaacgactgctcgagtgtcgttttcagcaagagcccatgggcggtgcggcgcgccgcataccgcatttttaccgcgtacgacgcgaggtcccgcgcacggtgaacgaaataaagcaggactttgtagtcaccgacttctacaaggtgggcaacatcacgctctacaccgagctgcaccccttcttcgactttacgcactgccaggaaaacagcgaaacggtggcgctgtgtacaccgcgtatcgtcatcggtaatttgccagatggactggcaccgggccccttccacgaactgcgcacctgggagatcatggaacacatgcgactgcggccaccacccgactacgaagagacgttgcgacttttcaaaaccaccgtgaccagccctaattaccccgagctctgctacctggtcgacgtgctggtacacggcaacgccgacgcttttttgctaatccgcgctttcatagcacgttgtatcgtcaacatgtttcacacacgtcagctgctggtttttgcacacagctacgcgctggtgacgttgatcgccgaacacctggctgatggcgccctaccaccgcagttgctctttcactaccgcaatctggtcgccgtactgcgtctggtaacgcgcatctcagcgctgccgggactcaacaacggccaactggccgaggaaccgctgtcggcttacgtgaacgcgctgcacgaccaccggctgtggccgcccttcgttacgcacctgccgcgcaacatggaaggcgtacaggtagtggccgaccggcaaccgttgaacccggccaacatcgaggcgcgacaccacggcgtttcggacgtaccgcgtttgggcgccatggatgccgacgagccgctgtttgtggacgattaccgtgccaccgacgacgaatggacgttacaaaaggtcttttatctctgcctcatacccgccatgaccaacaaccgggcctgcggcctgggactcaacctcaagacgctgctagtagacctcttttaccgaccggcgtttctcctgatgccggccgccaccgcggtctccacgtcaggtacgacgtcgaaagagagcacaagcggcgtcacccccgaagactcggtagcggcgcaacgtcaagccgtaggcgagatgctgaccgagctggtggaggacgtcgccaccgacgcgcatacgccgctgctgcaggcgtgtcgtgagctgtttttggccgtgcaattcgtgggcgagcacgtcaaggtgctcgaagtgcgcgcgcctctggatcacgcgcaacgtcagggcctgccggactttatctcacgtcagcacgtgctttacaacggctgctgcgtcgtgacggcgcctaagacgctgatcgagtacagcctacccgtacctttccaccgtttctactcaaaccccaccatctgcgcggcgttgagcgacgacattaaacgctacgtgaccgagttcccgcactatcaccgtcacgacggtggttttccgctacccacagccttcgcacacgagtaccacaactggctgcgctcgcccttttcgcgctactcggccacctgtcccaacgtgttgcactcagttatgacgctggccgccatgttatacaaaatctcaccagtttcactggtgctgcagaccaaggcgcacatccacccgggattcgcactcacggccgtacgcaccgacaccttcgaggtggacatgctgctctacagcggcaaatcatgcacgtcagttatcatcaacaatcccatcgtgaccaaggaggaacgcgacatcagcaccacgtaccacgtcacgcagaacattaacaccgtagacatgggtctgggttacacgtcaaatacctgcgtagcctacgtaaaccgcgtgcggaccgacatgggcgtccgcgtgcaagacctctttcgcgtcttccctatgaacgtgtaccggcacgacgaggtggaccgctggatccggcacgcggccggcgtggaacggccgcaactgttagatacggagaccatctccatgctgacgttcggcagcatgtccgagcgcaacgccgccgccacggtgcacggacaaaaggccgtgtgcgaactcatcctcacgccggtaacgatggacgttaattacttcaaaatcaccaacaacccgcgcggacgcgcctcctgcatgctgggcgtcgatccgtacgacacggaagccgccaccaaggccatctacgatcatcgcgaagctgacgcacagactttcgcggccacacacaacccctgggcctcgcaagccggctgtctaagcgacgtactgtacaacacccgacatcgcgaacgtttgggctacaactccaaattctacagcccctgtgcgcagtactttaacacagaagagattatcgcggccaacaaaacgctcttcaaaaccatcgacgagtacctactacgcgccaaggactgcatccgcggcgacacggacacgcagtacgtctgcgtcgaaggcacggaacaactcatcgaaaacccgtgccgcctgacgcaggaagcgttgccgattctcagcaccaccacgctggcgctgatggagaccaaactcaagggtggcgccggggctttcgccacgtccgagacgcactttggtaactacgtcgtaggcgaaatcatcccgctgcagcaatccatgttatttaactcgtgaggccgtccggtgaggaggacggcgacgaccgcaggttagcggcgagtcacctagacgcaaacgcgggcccggacgcgccacgctcgctctgacgccgcgcccggtgcagacgttgttcgtctccgcttctcctccgtcgcggccacgatttcaccgccgctatggcggccatggaggccaacatcttctgtactttcgaccacaagctcagcatcgccgacgtaggcaaactgaccaagctagtagcggcagtcgtgcccattccgcagcgtctacatctcatcaagcactaccagctgggcctacaccagttcgtagatcacacccgcggctacgtgcgactgcgcggcctgctgcgcaatatgacgctgacgttgatgcggcgcgtagaaggcaaccagatcctcctacacgtaccgacgcacggactgctctacaccgtcctcaacacgggacccgtgacttgggagaagggcgacgcgctatgcgtgctgccgccgctcttccacggaccgctggcgcgcgagaacctgctgacgctgggccagtgggagctggtgctgccctggatcgtgcccatgccactggcgctggaaatcaaccagcgactactcatcatgggcctcttctcgctcgaccgttcgtacgaggaggtaaaggctgccgtgcagcagctgcagaccattacttttcgcgacgccaccttcaccatccccgatccggtcatcgaccagcacctgctgatcgacatgaagaccgcctgcctctccatgtccatggtggccaatctagcctcggagctgaccatgacctacgtgcgcaagttggcgctagaggacagctccatgctgctcgtcaagtgccaggagctgctgatgcggctggaccgcgagcgcagcgtcggcgagccgcgcacgcccgcgcggccgcagcacgtgtcgcccgacgacgagatcgcgcggctgtcggcgcttttcgtcatgctgcgacagctggatgacctcatccgcgaacaggtcgtcttcacggtgtgtgacgtttcacccgataacaaatccgcgacctgcatatttaaaggctgagccggccctctcgcgcccgcagacaccaagcatgccacgcgtcgaccccaaccttcggaatcgggcccgccggccacgagccagacgaggcggcggcggtggcgttggcagcaatagcagccgacacagcggcaaatgccgccgccaacgccgagctctgtcggcgccgccgctcactttcctcgccaccactaccaccacgaccatgatgggcgtcgccagtaccgacgacgacagtctcctcctgaaaacgccggacgagctggacaagcacagcggctcgccgcagaccatcctcacactgacggataaacacgacatccgtcagcctcgggtgcaccgcggcacctaccatctgatccagttgcacctcgacctccgacccgaagaattgcgggatcccttccagattctgctctctacgccgctgcaattgggggaagcgaacggcgagtctcaaaccgcccccgcgacgtcgcaagaagaagaaacggcggcttcccacgagcccgagaaaaaaaaggaaaaagaagagaagaaagaagaggacgaggatgaccgcaacgacgatcgtgaacgcggcattctatgcgtggtctctaacgaggattctgacgtgcgcccggccttctctctctttcccgcacgcccaggctgccatatcctgcgctcggtaatcgaccaacaactgacgcgcatggccatcgtgcgcttatcactcaatctcttcgcgctccgtatcatcacgccgctgctgaaacggctaccgctacgacgtaaagccgcgcatcacacggcgttacacgactgtctggcgctgcatctgccagaactcacgttcgagccgacgctggatataaacaacgtaacggagaacgcggcttccgccgccgatgccgcggaatcaacggacgcggatctgacgcccacgctgacggtgcgcgtacgacacgcgctgtgctggcatcgagtggaaggcggcatctcggggccgcgtggactcaccagccgtatctcggcgcgcctctcggaaaccactgccaagacattgggaccctccgtctttggacgattggagctagacccgaacgaatcaccgccggacctgacgctgtcgtcactcacgctataccaagacggcatgttacgtttcaacgtgacctgcgaccgcaccgaggcgccagccgacccagtggcgtttcgcctgcggctgcgacgcgaaacggtgcgacgacccttcttttcggacgcgccactgccttactttgtaccgccacgctccggcgcggcggacgagggactggaggtgcgcgtcccttacgaattgacgctgaagaactcgcacacgttacgtatctaccgccgcttttacgggccttatctaggtgtttttgtaccacacaaccgtcagggactcaaaatgcccgttacggtctggctaccgcgctcctggttggaattaaccgtactggtgagcgacgagaatggcgccacgttcccacgggacgcgctcctggggcgcctctattttatctcgtcaaagcatacgctgaatcgcggttgcctgtcagcaatgacgcaccaagtcaaatccacgctacactcgcggtccacgtcccattcgccgtcgcaacagcagctctcggtgctgggcgcttccatcgcgttggaggacctgctgcccatgcggctggcgtccccggagacggaaccgcaaaactgtaagcttacggaaaatacgacagataaaacgagtcctgtcactttagccatggtctgcggcgatctctaaacagaggaccctggtgatgggaaacggacactaggcgtccgcgcgatacggggttaaaacaaaaaaatcggtggtggtgtgtgatggggtgtggtgacggtggggctttgcctctttttttaataaaaaaagacactcaataatccgcggttgtctctgtgtagaacgtttttatttcgggttccgcgtctggtcgcctgcctatgtaaggcggcggccggagagggcgcgccgctcagtcgcctacacccgtacgcgcaggcagcatggagtcgcgcggtcgccgttgtcccgaaatgatatccgtactgggtcccatttcggggcacgtgctgaaagccgtgtttagtcgcggcgacacgccggtgctgccgcacgagacgcgactcctgcagacgggtatccacgtgcgcgtgagccagccctcgctgatcctggtgtcgcagtacacgcccgactcgacgccatgccaccgcggcgacaatcagctgcaggtgcagcacacgtactttacgggcagcgaggtggagaacgtatcggtcaacgtgcacaaccccacgggccggagcatctgtcccagccaggagcccatgtcgatctatgtgtacgcgctgccgctcaagatgctgaacatccccagcatcaacgtgcaccactacccgtcggcggccgagcgcaaacaccgacacctgcccgtagctgacgctgtgattcacgcgtcgggcaagcagatgtggcaggcgcgtctcacggtctctggactggcctggacgcgtcagcagaaccagtggaaagagcccgacgtctactacacgtcggcgtttgtgtttcccaccaaggacgtggcactgcggcacgtggtgtgcgcgcacgagctggtttgctccatggagaacacgcgcgcaaccaagatgcaggtgataggtgaccagtacgtcaaggtgtacctggagtccttctgcgaggacgtgccctccggcaagctctttatgcacgtcacgctgggctctgacgtggaagaggatctgacgatgacccgcaacccgcaacccttcatgcgcccccacgagcgcaacggctttacggtgttgtgtcccaaaaatatgataatcaaaccgggcaagatctcgcacatcatgctggatgtggcttttacctcacacgagcattttgggctgctgtgtcccaagagcatcccggggctgagcatctcaggtaacctattgatgaacgggcagcagatcttcctggaggtgcaagcgatacgcgagaccgtggaactgcgtcagtacgatcccgtggccgcgctcttctttttcgatatcgacctgctgctgcagcgcgggcctcagtacagcgagcaccccaccttcaccaaccagtatcgcatccagggcaagcttgagtaccgacacacctgggaccggcacgacgagggtgccgcccagggcgacgacgacgtctggaccagcggatcggactccgacgaggaactcgtaaccaccgagcgcaagacgccccgcgtcaccggcggcggcgccatggcgggcgcctctacttccgcgggccgcaaacgcaaatcagcatcctcggcgacggcgtgcacggcgggcgttatgacacgcggccgccttaaggccgagtccaccgtcgcgcccgaagaggacaccgacgaggattccgacaacgaaatccacaatccggccgtgttcacctggccgccctggcaggccggcatcctggcccgcaacctggtgcccatggtggctacggttcagggtcagaatctgaagtaccaggagttcttctgggacgccaacgacatctaccgcatcttcgcggaattggaaggcgtatggcagcccgctgcgcaacccaaacgtcgccgccaccggcaagaagccctgcccgggccatgcatcgcctcgacgcccaaaaagcatcgaggttgagccacccgccgcgcacgcgcttaagacgactctataaaaacccacgtccactcagacacgcgacttttgagcgccacacctgtcgccgctgctatatttgcgacagttgccggaacccttcccgacctcccacgaagaacccgtttacctttgtgcatcccctgaccctccccccatcccgccttcgcgatgtctcaggcatcgtcctcgcccggtgagggaccctcgtcggaagcggccgcgatcagcgaggctgaagccgccagcggaagctttggtcgcctgcactgccaggtgcttcggctcatcaccaacgtggaaggcggctcgctggaagccggtcgtctgcgactcctggacctgcgtaccaacatagaggtgagccggccctcggttctctgctgttttcaggagaacaaatctccgcacgacaccgtagacctgaccgacctaaacatcaagggccgctgcgtggtgggcgaacaggaccgactgctggtggacctcaacaactttggcccacgacgcctgacgccaggctcagaaaacaacacggtctcggtgctggcctttgcgctgccgctggatcgcgtgcccgtcagcggactgcacctctttcagagtcagcgacgcggcggcgaagaaaatcggccgcgagtggaggcccgagccatcatccgccgcacggctcactactgggccgtgcgactgaccgtaacgccgaactggcgccgcagaaccgacagcagcttggaggccggccagatctttgtcagccagttcgcctttcgcgccggcgctatcccgctgacgctggtagacgccctggagcagctggcctgttcggaccctaacacgtacatccacaaaacggagacggacgagcgaggccaatggatcatgctgtttctgcatcacgactcaccgcacccgccgaccagcgtgtttctgcacttttcggtttacacgcatcgcgccgaggtggtggcgcgacacaatccgtacccgcacctacgacgcttgccggacaacggcttccagctgttgattcccaaaagttttacgctgacgcgcatacatcccgaatacatcgtgcagatccagaatgcttttgagaccaatcagactcacgacaccatttttttcccggaaaacatcccgggcgtctccatagaagccggtccgctacccgatcgtgtgcgaatcaccctccgcgtcacgctgaccggcgatcaggccgttcatttggaacaccgacagccgctaggccgcatccattttttccgccgtgggttttggactctcacacccggtaaaccggacaagatcaagcgtccccaggtgcagctgcgcgccggtctctttccacggagcaacgtcatgcgcggcgccgtctccgagtttctcccgcagtcccccggattaccacccaccgaggaagaggaggaagaagaagaggaagaggacgacgacgatgacctctcctccacaccgacgccaacccccctgtccgaagccatgtttgccggcttcgaggaggccagcggtgacgaggactcggacacccaagccggactgtcccgggcactgattctgaccggacaaagacgccgaagcggtaacaacggggctctcacactcgtcatcccctcgtggcacgtctttgcgagcttggacgacctggtaccattaacggtgagcgtgcagcatggcgcactacgacctacctcttatctgcgcagcgacatggacggcgacgtgcgtaccgcggcagacatcagcagcacgttgcggtccgtgcccgcgccacgaccctcgcccatcagcaccgcttccacttccagcaccccacgcagtcgaccccgcatctagagagagacttctttgttgttcccccgcgtgtttttcccattccctgtatttatttctaaataataaaaatacagagacgttgataataaccgcggtgtgctttattagggtatcatggtgtagaaaaaaaagagagggaagccctaaatatagcgtctctcttattcgagcttattgagcgcagccacaaaaatccgccgattcagatccaccatgtctttgggcgggctctgggaagctgcggcggcttgggcagcagcggcggctaacacgacactagccggacaggaagaagaacccgccgtcgaaggccctgccgttgccgcctcagaacccgacgcggtagcgaggcggcaactggcgttcaccacgccggcctgagcgcgctcagctaccttggcacctcctgatagaagtgccgtcggtgtttctcctccgccgctcgtcagctcgccggtgggagtacacacggtagtagtagtcggggaggaagaggccgcagcggggagagccgccgaaagtaacgtagaactctgccgcgcggcaaacagatcgcgtttcagctcgtgaatggcatcccgcagttcatcgtaacgttgttgctgctgctgattggaacccgcgtgcccgccacttccaccgtcgctattgacgtgactttttagacgctttcgcgcccggccgtgctcggcctcgccggggaaactcaagtcttcgtccgaggacgacgacgacgacgccgccgcggcttccttacggcgtttgttgtgtccaccgctgcccccgtgacggtgctgcttctgcgactgaccacggtgaccaccgtcgtaacgctcccatccggacggtggttcatccataccgcccggagagtcgcgccgacggtaataggccggtgatggtggcggtggcacgggataagacggatgcaaagacggcgcgggctcgtaacgccgaccccacccgggataatggggatccacgtaatccgcaaagtgacgtaccgccaactggtcgtaacccacgacgggggcgccgtaggacgcgggataagatggcaaaggcagcggtgctggcgaagcagaaggaggggccgctacggcgccgggatacattacgggcgctgccgagcgactggccccaagtaacgagaaaaaagcgtccttgggtaaataaactccgtcgtgaggccacgctagagacggcacagccggcgacgcacctgccacggtagcacctggaggagccgtagcggcggtaaccgcagcactcagagggtgcgacatggacgccgcctctgccggctccgagggagaaagcgacggcggtgattccgcgggaagaacggacggcgacgctggaagcgcaggcggctggacaggagatggcggttcgactggaggcgacggggacgaagagggaacgcgcgccccagtcgccggcgtggcggcctgactgcggctgtcgcccgaacgctcggcggacgccgctttaatatcgcacgccgcctcaggcgaaacgctcgccttgacgtacgactcgcgctccgtcacgccgactagttgcttgtcgtagcgcagcttgggcagtcgctcacggatgtagagcgcgtccacgctgttgcccaacaggccgtagctgtctgagcgaaagggatcgcccgacgcgtcgacagcagtgctgccgcagcgctgccactgtgcacgtagcccgtcgcggtcggccgccgtgaggtctggaaaccgctgggtgacccactcgggatcgcgcccgtacacggccaacgtaccgcgacgccgacccacgctgcacaaagccacgtgtttgaacggcgtggtttccgagcccgaaagcgacgtcgcggcctccacgtcgtcgcagcgccggctggagagcgagaggccggcgtagctgccgctgagaaactccaccaccttgtctggctgcagcggactgacgggcccgcgcgaaaccagctcggacttttccgaagcgcggcgtacaatctccagaaacctgggcgaagtgacgcagcccaggcaaaaaagaccgtcgcggacgctctgcatcgccgcaacgtgtcctacaacggccgtatcgtcgtggttgatgttgagcgggagcgcgaccgacaacgaaggctgtccctggctctgcgcatacaaccagtgctccactacgtcccgcggcaacagcaattcggcctcgtccggagactggtcgtagcgggcgagaaagccgcccacgtagaccggcgccacagcctgcggctgttgctcgtccatcgtcattgtcgtcaccgtcactacccgctcaccgagcgaacgatgatggcccgcgacgaagagaaccccgccgtcccgcgggtccgcacgggcaaattctcctttacttgcgccaatcatctaatattacagattagcgagaagatgtcgcgcggacagccgctgagctcgctgcgtttggaagaactcaaaatcgtacgcctcatctgcgtcctcctctttcaccgcggtctcgaaacgctgctactgcgcgaaaccatgaacaacctgggtgtctcggaccacgccgtgcttagccgcaagacgccgcaaccctactggcctcatctgtaccgcgaactgcgccaggccttcccggggctggactttgaggcggccgtgttcgatgaaacgcgcgccgcccgtctcagccagcgcctgtgtcacccgcgcttgagcggcggactgctgacgcgctttgtgcagcgccacaccggcctgccggtcgttttccccgaagacctggcgcgcaacggcaacatcctcttctccctaggcacgctctacggacaccgcttgtttcgtctggcggccttcttcacgcgccactggggtgccgaagcgtacgaacccttgattcgcatcatctgtcaaaaaatgtggtacttttatctcgtcggcaccggcaagatgcgcattacccccgatgccttcgagatacagcggagtcgacacgagacgggcatttttacctttattatggaagattacagaacgttcgccggcacgttgtcccggcacccgcaccgtccgcacccacaacagcagcagcaccaccaccccggtcccccccatcctcctctttctcaccctgcctcgtcctgtctcagcccagaggccgtactggccgcccgcgcccttcatatgccgacgctggctaacgacgtgtgaacctgacgtgatttatctgccacttttctccccgctgccgtacagcgccgccgctcataatgccgtcaccgtcgcatccgacgcgacggtgttttcgccgtcggtgcagaggacggaggaactttcggccgaaacatcgatcgtagtcccaggacacatttcggaagccatgccttccgcgtgctccaccaacgtggctttctccgacgtggtcgtcgttaccacaacagccgccgacgtcgcgtcggcgtaacaacggctggaggactttttcaccgcctcggcgacgtctcggacggacgtagaaaagtaacacacggccagctccacgctatacatagcccgcttcaacgcctgcaccaaccgacgtacgaaatgaccgtggcagctctgatgacatttctcgaccagataatcaaaggagtcatccagatccttggtgggctcgcgggagaagaacgcaatgataaagagcggcagaatgccaagacgcatggtgagaagggtacgcgtagccaattccacgtaatccataatgccgaaaccggtgccggccgcgctagcgggctgcaatacaccgcgtaggactctgaagcagtagtaaggcacaaaaagcatgagacacgtcacgtagaaggtgcagacacgacccacgtaggaccagacgtggtcgcgccgatcgctgtaggccaactctaccacgttagccagtacggcgatcatgggcgcccccagcaaaaaccacattttgatggtgaggtccaccgcggcatactgtatagggatctgacagcctagccaacggtagtccagtgaacccgtagcggcggtgggcacagcggctacgatggaaagaacccaggcaaaggcgaccgcgtagagcgccacgccggcgttttcgcgcgtctcatgatgccagagatcacggccataagagatggccgacagacgatccagtatcagaaagaggaaaaacaacgccgtcgaatataggcccacgtcgtcgacaaagagcactaagcgacagaggctgagatttagagcgccacgcagcatgatacccttggacaacatggtagccacgatggaaaaaaactgactaagtaccaggttccaagtaaaaatcatcacggacacgggcggccgcgtaacacgcaacacccagaggcaaccgatgatggtcagcaggttgactaggctaacggagccgaacatgccgatgagcaggtccgaagcggcgcgatcggccgacatagagtagccttcgaacgggcccatgtatttgaaattcacgatagcgagcatgatggaatcggtgactgaggtagtcttctccgcagaaggggacatacccaccaccgccgcccgctctctccgaacgaatataccctctccggggacgctcgccctttatgcagcaagcgacacgtggtggaaattacaacaccgccacgctcggaagaaaacccaacactaaaaagtacaacagttcgtaaatatcgttgacgttaaagagggacgagcccagagtggacacacgatgacgcggcagggtcactgacaacagccgccctagcccgtgttcgtagtgaaagagcagggcgtcgtgtacttccaagcgacgtaaatcgccgtactgtttggagctctgcgcgaacatgtagtcggccacgggattgctcttgctgagctgcatgagcacagcgccgccgccgtcgccacctccggcgctgtcctcgcgacgtgagggatcccagccgctgcgcacgctctcggtcacggccaacagagccaggccgggaaagagctgcgacagcgtgaccgcggggtcgcgcgcgtaccacggcccgatgtagtactgcaccagaaactcaaagttacgtacccgcccgtgccgtcccccatagccctcctcttcgccgcccgcgcgccccccgggcaatccaccgccggccacagcgtccgaacccagcaggtcggccaacgtgaatttgcccgtacgcggagcgaagacgctatccgcgttggtcaccttccacaacagcaacaggctagccaggcaggtcaagcccgaacgcagatattgctgttcgtgcacaaagacgggcacgtcacgacccagcttgccgaccagcagacgtcggctccagagagaaagcacatcgtctcgcacctggcccgacagacgctcctgcaccagctcctctgttatcgtcccgtagcccggcaaatgctggaggacgccgcgtttgtggaaaagccgcaccagcacgtgacgatcaaaagtgcccgggtgatagtggcgaccaccacttaggggcatgtagtaacgtagatcgggcgagtcgcgatacgcgtaatagttgttacccgcggcgacagggccttcccaagcggcaatctcacgacttacgtcatcggccagacgcggcaacagctgagggagctcacccaacaccgtcgccacggagtccggcggatcgcggccctcccaaagcgcgtgtccgtaggcggccagcagacaagcggcggcttccaaatcggatagtacgcagtcgtacgtcggatacaccgtcacgttttccaaagcgttgaccacgccgagcagcagctcctgcgaaatggaaaagttgtccatctgcgccagatggtacactcgtttccaccgtggttgcgtgtacaacccccgcttgagccgatagtaccagataccaaaggagaaagtccaagtagaggcgttctcgaacatggtgttgaccacctcgccgcgaaaatcggtgtgaaagcggataaagggatcgttctgcgtgattccaaagtagctaggtacgttcccgggcaacggccgctcggcgcactgcgccagccaggtagaagaagcaccggcggccgctgacgcggcgaccgcgtcagacggggcaaccgcgtcagacggggcaaccgcgtcagacggggcggcggcgggtcccgtgatggcatcgtgccgactataaagaccgtgtgggacggcggaagctcctgccacgccggtccctggggacgacgaacgcggacgacacggtggttgtagcagcgtccgcggcgacggtccttcgtcgagctcgcactgctggttcaacagcgcctccgcctcggacacgcgcccttcgagatcctcgcagtaagtctgcaccctgtgacccagatccctgagctcctgacgcagataccgtttgcgcacccggtccatgagcacatcctcgcgccagcccccgccgcgcgttgccaccgccgcgtcctccagcaaccgccgaagcacgcgctcggggcagcgcagcacgttttcctcgtgcggctcgaagaagacggcgacgggtagccgccaaaaggtgtgcaacagactcatcctgacgccgtcccagatagtccaggacagaatcggtacacaagtcgaaacggcccgaacgaaaagcccgataaaaggatgggcgatcggccttttgctgaaaaaaaaccagactgggcactacgctccagacctgaccgccaccgcgcggcagacgcagaaaatcaaagtccaccagggcgcccttgagctggcgcaggccctcggcgtactgcaggctgtgggtggcgtgccaccgcacggactgatcgtcggcgtctgagtacgtggttttgaattcaatcacgtagcaatacacgatgccgcgcgacccagagtccggcggtaaaaataccaacacgcagtcgggaatccgccgacttaatcgtacttcgatgaaaagacggcgacggtacttttgcagctcgggtgggaaaaggcctcccaacaggcggttgagggccacaaacgagggaaagacccgcaacaggcgacggtagatgtccaggtgcttacgcttaccgatccgcttacgcacgtgaggcaatctccgcagagcgttccccgtcgaatcagcgtcgtccccacgcccggacggcatggcttacccgcgtgtcccctcttcttccttcgcagcggccaatgacatcgtattaaatagacagagacgcgacttttgtaacccgtagcgccacacccgggtgccccttcctgggatcctttctctccttctctcgggtgtaacgccaaccaccacctggatcacgccgctgaacccagcggcgcagccgcgctatgcggcccggcctccccccctacctcactgtcttcgccgtctacctcctcagtcacctaccttcgcaacgatatggcgcggacgccgcatccgaagcgctggaccctcacgcatttcacctactactcaacacctacgggagacccatccgcttcctgcgtgaaaacaccacccagtgcacctacaacagcagcctccgtaacagcacggtcgtcagggaaaacgccatcagtttcaactttttccaaagctataatcaatactatgtattccatatgcctcgatgtctttttgcgggtcctctggcggagcagtttctgaaccaggtagatctgaccgaaaccctagaaagataccaacagagacttaacacctacgcattggtatccaaagacctggccagctaccgatctttttcgcagcagctgaaggcacaagacagcctgggtcagcagcccaccaccgtgccaccgcccattgatctgtcaatacctcacgtttggatgccaccccaaaccactccacacgactggaagggatcgcacaccacctcgggactacatcggccacactttaaccagacctgtatcctctttgatggacacgatctgctttttagcaccgttacgccctgtctgcaccagggcttttacctcatggacgaactacgttacgttaaaatcacactgaccgaggacttcttcgtagttacggtatctatagacgacgacacacccatgctgcttatcttcggtcatcttccacgcgtactcttcaaagcgccctatcaacgcgacaactttatactacgacaaactgaaaaacacgagctcctggtactagttaagaaagctcaactaaaccgtcactcctatctcaaagactcggactttctcgacgccgcactcgacttcaactacctggacctcagcgcactgttacgtaacagctttcaccgttacgctgtagacgtactcaaaagcggtcgatgtcaaatgttggaccgccgcacggtagaaatggccttcgcctacgcattagcactgttcgcggcagcccgacaagaagagaccggcaccgaaatctccatcccacgagccctagaccgccaggccgcactcttacaaatacaagaatttatgatcacctgcctctcacaaacaccaccacgcaccacattgctgctatatcccacagccgtggacctggccaaacgagccctctggacgccggaccagatcaccgacatcaccagcctcgtacgcctggtctacatactttctaaacagaatcagcaacatctcattccccagtgggcactacgacagatcgccgactttgccctacaattacacaaaacgcacctggcctcttttctttcagccttcgcgcgccaagaactctacctcatgggcagcctcgtccactccatgttggtacatacgacggagagacgcgaaatcttcatcgtagaaacgggcctctgttcattggccgagctatcacactttacgcagttgctagctcatccgcaccacgaatacctcagcgacctgtacacaccctgttccagtagcgggcgacgcgatcactcgctcgaacgcctcacgcgtctcttccccgatgccaccgttcctgctaccgttcccgccgccctctccatcctatctaccatgcaaccaagcacgctggaaaccttccccgacctgttttgtctgccgctcggcgaatccttctccgcgctaaccgtctccgaacacgttagttatgtcgtaacaaaccagtacctgatcaaaggtatctcctaccctgtctccaccaccgtcgtaggccagagcctcatcatcacccaaacggacagtcaaactaaatgcgaactaacgcgcaacatgcacaccacacacagcatcacagcggcgctcaacatttcactagaaaactgcgccttttgccaaagcgccctgctagaatacgacgacacgcaaggcgtcatcaacatcatgtacatgcacgactcggacgacgtccttttcgccctggatccctacaacgaagtggtggtctcatctccgcgaactcactacctcatgcttttgaaaaacggtacggtcctagaagtaactgacgtcgtcgtggacgccaccgacagtcgtctcctcatgatgtccgtctacgcgctatcggccatcatcggcatctatctgctctaccgcatgctcaaaacatgctgactgtagaacctgacagtttatgagaaaagggacagaaaagttaaagacattcacacaaaatcttctaaaacggtacgggccccaatacttaggggcactcttgctcgttgtaataaagtacacgccacacggtgtgatggtactatatgcgtgaggtctgtgcgtctttatttacgaggtactgttatgggtctggttacatatcgggccctggatacaagctcggtacacagccaaggtgcgggagactaggtcgtcttggaagccgatgcaacaacggtagatgagcagcaaaacgaccagaatcagcagtgagtacacgcaggcaagccaaaccacaaggcagacggacggtgcggagtctcctcctctgtcatggggagaaaaggagacatgagaagcatttctaaattattctttattatatcactgactgtcctgttattttctataataaactgtaaggtcgtcagaccaccgggacgttactggttaggtacagtactttctacgataggcaagcaaaaactagataaattcaagttagagattttaaaacaattagaaagggaaccttatacaaaatacttcaatatgactagacaacacgttaaaaatcttactatgaatatgacccagtttccacaatactacattctagcaggtcccattcgaaacgatagtataacctatctgtggttcgatttttatagtacccagcttagaaaacccgccaaatacgtctactcacagtacaatcatacggctaaaacgataacattcagacccccatcttgtggtacagtgccttcaatgacttgtctttccgaaatgttaaacgtttccaaacgtaatgatactggcgaacaaggctgcggtaattttaccacgttcaaccccatgtttttcaatgtaccacgttggaataccaaattgtacgtgggtccgactaaagttaacgtagatagtcaaacgatttattttttgggtttaaccgccctacttctacgttacgcacaacgcaactgcacacacagtttctacctggttaacgccatgagccggaatctattccgcgtccccaagtatattaacggcaccaagttgaaaaacactatgcgaaaactaaaacgtaaacaagcgccagtcaaagaacaattagaaaaaaagactaaaaaatctcagagtactactacgccatatttttcctatacaacgtctaccgctctcaacgtcactactaacgcgacttataaggttaccaccagcgcaaagcggattcccacatctacgattgcttatcgtcctgatagcagctttatgaagtccattatggccacgcagttaagggatctagcgacatgggtgtatactactctacggtatcggaatgaacccttttgtaaaccagaccgtaaccgtaccgccgtgtcagaatttatgaaaaacacgcacgtattgattcgtaacgaaacaccgtacactatttacggcactcttgacatgagctccttatactacaacgaaaccatgtccgtggaaaacgaaacggcttccgataataacgaaactacacctacgtcaccatcgacgaggtttcagaaaacgtttatagatcccttatgggactatctagactcgctgctgtttctagataaaatccgtaactttagcctccaattacccgcgtatggaaatcttaccccgccggaacaccgccgggctgtaaatctatccaccctcaatagcctttggtggtggtcgcagtaaagttctggaagcagcaatgtcgtagtacgatacaaaaggctcccatcagaatgagagcgttaagcatagtccaccaggctgcaaagctggatagtgaaagctcatacatatgcgatgtacaatgcgcattgtaaaaatcattgtgagcatgtggtctcatcacgttggggtcgtgagtggtggaaccgggtttggcactagtcgtcgatgaagtacttgtcgccgtagttgtactagttgtcgcaacagccgttgacttcacggttgttgaggtgcgagtagagctagaaggactcggtgtgctagcagtcgacgtattgttggaacttgccgctaccgataaaaccaaaagacctagtactagtgtgttccactccatcgcaccaccgccacgatgcttacgatgttgaccgaccgaatcgactctcaactggtactgtcgcggctgccgcgctcccgttttcagcgattctgggagacccctacgttaataatgaaggaagagtccgcaccgtcatcaggctccatcatcctagccgagaaatccgtcaacatgcgttactgcgtacgtttcgctagcgatagcgattttcaaaccacatttacgctgccccaatcggtcgaggagaaatacgacaaagagcagcatccgggagaagatgaagcgtcgtcgccattaccgtcaccgctcaaagttccctacaagtggatgccttccagtttcatcgtcaaacaatgccacacgcagctggccttttacaataaacacatcatttggctatcacgcgagcgcaaagtgcccacctcgctgggcgtcagcctctatatccccgaaggttttttcggcattaccttttacaaatgcctggacgcgcaattcgtttgcatgcccgagctgctggaatccgggctgcaagtcccgcagttggatgtcgtcaacctcaacgacacttttcagtccatctttccgggcaccatcgaaggcgatatcggcgttttcccctgttttgtgccagaaccctggcagctcatgaacttgccgccgcccaacgaacaccgtttcttttcattacgtacccgtcagacgctggtgatcggtccgggtcacacgcaaaccgtctattttgacgcggcctacgtgcacgcgcccggtatctgcgccctcatagtgggcgtgcgccagtttagtcagtcggatctcatcatccgacccaccatctggctcccgggtaccgcggccggcgtgacggtggtcaacacttcgcacaccaccgtctgcatctccccacacaccaccgtagccaaagcggtttttaccacccaccgctttacctatctgccggtgggcagtcaccccctaggacagatgatcgtgccgcccacccccgacatcggtttcacccacacgcccgagcacgcgttgctgcaacggacaccctcgccggtagacgatgacgtcgacgagacagaagaagatgaaaagagctccgacgcagaaagccctgtcaacacgaatgacgttatttttgacgtcggcccgaaacctccccgtcatccctgacctaataaagtacgtctatgagaaaccccgtactcgtcgtgtccgtgatcacgtacgttttccaaaacgtgccaggctgttcacgcggaggacagcaaggccgccgccgtgggtttctttttcttcacgcccctgagttcacgcgcggaacccacaaagggtatctggggaggaggtatggtgaccatggtcggtgacatcaccgcctcccgaggcacgtcggggctgtgtcgcatgagatccaaaatctcgcgttcgtgattcgtaggcagcgtctcctgcggcgccgactccttgtagcgccgacggtgagacccgcgtccctggggctgctgctgcacgggctcgaccggcggctgctgttgcacgggctcgggtgacggcgacatcacggtcacttcatcctcctcgtcgccctcttccagcagccgctggtcgaacctcataacggtaggacaggagacggtgttaatgtgagccaaactcatcataggacgcgtgacccccgtttcctcggggatcagcgagtccgaaaccgagggacaggcaaaggccgacacggcggcaaccgtttccccgtcctcgcggacaccgctttccccctgaacgaccgccggtggcgtcggtggcgcaaccgtcgcagccgcgccggcctcgagcatgtacgcgcttttctcgcagtccatgtccaccaggcccataacgcgctgcacctccaccagcgaggcctgatccgtggagaacttgtccagcaacatctccaagctgtcggcctcggacatggcaaactcgcccaccaccagtttgaggataagaatgtccagggcctccaggatacgctgcgatttcttgcactccacctcggccgccggccgcgtgtgaggcaaacagccctccgagagatagcccttgagaaacgcgcacttgctctggcattgcctatagagcggcagcagcttcagcaggtggttcaccacgtccgtgtcgcgagaaaaggttcgcaggtcggccggggtgatctccagctgcttaaagttctcgtccagaaacgcctgcagctcgcgcagctccacgtcctcgctaggctgcagcagcacgtaatcggccacaggcgcggctttgcgacggcacatcagcagctcgcacaggcgctgggctagctgcatcgtgccggcgcgacgatgacgctcgttctgttcgcaacagagtatgattctgctcatatagtcgccaacgtactctcgcagacaccgacggaccactgcgtcttccccctgctggtcaaacaccaggtctcgcgacgtgtttatttctgcctacagacgcaaaagtgctcggactcgcggcgggtggcgcccgtcttcgccgtgaacaacgaaacgctgcagctctcgcgctacctggccgcgcgccagcccatccccctctcggcgcttatcgccagtctggacgaggccgagacgcagccgctctaccggcatctcttccgcacgcccgtgctctcgcccgaacacggcggcgaggtgcgcgaattcaagcacctggtgtactttcaccacgcggccgtgctacgtcatctcaaccaggtcttcctctgccccacctcgccctcgtggttcatcagcgtcttcgggcacaccgagggccaggtgctgctgaccatggcctactacctattcgagggccagtacagcaccatctccaccgtggaggagtacgtgcgcagcttctgcacgcgcgacctgggcaccatcatccccacgcacgcctccatgggcgagttcgcgcgtctgctactgggctcgcccttccgtcagcgcgtgtctgctttcgtggcgtacgccgtggcgcgcaaccgccgcgactacaccgagctagagcaggtggacacgcagatcaacgcgttccgcgaacgtgcgcgtctgcccgacacggtctgcgtgcactacgtctacctggcctaccgcacggcgctggcacgcgcgcggttgctcgagtaccggcgcgtggtggcttacgacgctgacgcggcgcccgaagcgcagtgcacgcgcgaaccgggttttctggggcgccggctttccaccgagctgctggacgtcatgcaaaaatacttctcgctcgacaactttctacacgactacgtggagacgcacctactgcgtctcgacgaatccccccactcggcgaccagcccgcacggtctgggactggccggctacggcggccgcatcgacggcacgcacctggcgggcttcttcggcacctccacgcagctggcgcgccagctcgaacgcatcaacacgctttccgagtctgtcttctcgccgctggaacgctccctgtccggcttgttacgtctatgcgcctcgctgcgcacagcccagacctacaccaccggcacgctaacgcgttactcgcaacgtcgctacctgctacccgagcccgcgctggcaccgctgctggagcgaccgctgcccgtctaccgcgtacacctgcccaatgaccagcacgtcttctgcgccgtggcctccgaaacctggcatcgcagcctctttccgcgcgacctgctccgtcacgtacccgacagccgtttctcggacgaggccctgaccgagaccgtgtggctacacgacgacgacgtggccagcaccagccccgagacacagttctactacacgcgacacgaagtcttcaacgaacgtctgcccgtcttcaattttgtggccgactttgatttacggctacgcgacggcgtctccggtctggcgcgacacaccgtctttgagttatgtcgcggactacgacgcgtctggatgaccgtatgggcgagcctctttggctacacgcaccccgaccggcacccggtctatttcttcaaaagcgcgtgcccacccaacagcgtgcccgtggacgcggccggcgcgcctttcgatgacgacgactatctcgattaccgggacgagcgcgacacagaggaagacgaagacgggaaagagaataaaaataacgtcccggataacggcgtttttcaaaaaacaacgtcctctgttgacacgtcacccccttactgccgctgcaagggcaaactggggctgcgcatcatcacgccgttccccgcctgcaccgtagccgtacaccccagcgttttacgcgccgtggcgcaggtgctcaatcacgccgtctgtctcgacgccgaactgcacacgctgctggaccccatctcgcatcccgagagcagcctagacacaggcatctaccaccatggacgctctgtacgtctgccctacatgtataaaatggaccaagacgacggctatttcatgcatcgccgtctgttgccgctgttcatcgtgcccgacgcctaccgcgaacacccgctaggctttgtgcgcgcccaactggatctgcgtaacctgcttcaccaccacccgccgcacgacctgcccgcgttgcccctgtcgccgccgccacgcgtcattctcagtgtacgcgacaaaatctgcccctcgaccgaagccaactttatcgagacgcgctcgcttaacgtgacgcgttatcgacgccgcggtctcaccgaggtgctcgcctatcacctgtacggtggcgacggcgccactgccgctgcgatttccgacacggacttgcagcggctcgtcgtcacccgcgtgtggccgccgctgctcgagcacctcacgcaacactacgagccgcacgtcagcgagcagtttaccgcgccccacgtcctcctctttcagccccacggcgcctgctgcgtggccgtcaagcggcgcgacggcgcgcgcacgcgggattttcgctgtctcaactacacgcaccgcaacccgcaagagaccgtgcaggtgttcatcgacctgcgcaccgagcacagctacgcgctctgggccagcctctggagccgctgtttcaccaaaaagtgtcactccaacgccaaaaacgtccacatctccatcaaaatcagaccgcccgacgcgcccatgccgccggcgaccgccgtctgagcctcactttccacggcgccggtgacccgccccccggcagcggtctcatctatatatacatcagcgtgcccgaacgtgaccttcctagcgacggcggccatggagctgcactcacgcggccgtcacgacgctccgtcgttatcttccctgagcgagcgcgaacgccgcgcccgtcgcgcacggcgcttctgtctggattacgaacccgtgccacggaagttccgacgcgagcgaagtccaacctcgccgtcgacacggaacggagcagccgccagcgaataccatctcgcggaagataccgtcggcgccgcctcgcatcatcaccgaccctgcgtccccgcacgacgaccccgctacagcaaagacgatgataccgaaggcgatccggaccactatcctcctccccttccaccctcctcccgccacgcactcgggggcaccggcggacacatcatcatgggcaccgcgggcttccgtggcggacatagggcgtcctcctctttcaagcgacgcgtggccgcgtccgcctcggtgccccttaacccccactacggtaagtcttacgacaacgatgacggcgaaccgcaccatcacggcggcgattcgacgcatcttcgtcgccgagttcccagttgtcctacgactttcggttcttctcacccctcctcagccaataatcatcacggatcgtccgccggaccgcaacaacaacagatgctggcgcttattgacgacgaactggacgccatggacgaggacgaactacagcaactcagccgtttgatcgaaaagaaaaaaagagcgcgtctgcagcgcggcgccgcctcgtcgggtacctcaccgagttctacctcgcccgtctacgaccttcagcgctacacggccgagagtctacgtctggcaccctaccccgccgatctcaaggtccccaccgccttcccgcaagatcatcagccgcgcggtcgcatcctgctgtcacacgacgagctcatgcacaccgactacctgttgcacatccgtcaacagttcgattggctggaggaaccgttgctgcgcaagctggtggtggaaaagatcttcgccgtgtacaacgctcccaacttgcacacgttgctggccatcatcgacgaaacgctcagctacatgaagtaccaccacctgcacgggctacccgtcaacccgcacgatccctatctggagacggtgggcggcatgcgtcagctgctcttcaacaaactcaacaacctggacctgggctgcatcctggaccaccaggacggctggggcgaccattgcagcacgctcaaacggttagtcaagaagcccggtcaaatgagcgcctggctacgcgacgacgtctgcgatctgcagaagcgtccgcccgagaccttctcgcaacccatgcaccgcgccatggcctacgtgtgctctttctcgcgcgtagccgtctcgctacgccgtcgcgcgttgcaagtcaccggtacgccccaattttttgaccagttcgatactaacaacgccatgggtacctaccgctgcggagctgtctcggacctgatcctaggcgccctgcagtgccacgagtgtcagaacgagatgtgcgaactgcgcatccaacgcgcgttggcaccctatcgtttcatgatagcgtactgtcccttcgacgagcagtcgctattggatctcaccgtctttgccggtacgacaacgacaaccgccagcaaccatgccactgccggcggacaacagcggggaggagaccaaattcatcccaccgatgagcaatgcgcaaatatggaaagcaggacggacccagcaacgctgacagcttacgataaaaaggacagagaagggagtcatcgacatccctctccaatgatcgccgccgctcctcccgcccagccaccgtcgcaaccacagcagcactactctgagggcgagctggaagaggacgaagacagtgacgacgctagcagtcaagatctggtacgagccacggatcgacacggggacaccgtcgtctacaagacgaccgcggtccctcccagtcccccggcgcccctcgccggtgtccggagtcaccgtggtgagcttaacttgatgacgccgtcgccttctcacggcggcagtccaccccaggttccccacaagcagcccatcatcccggtgcagtccgccaacggtaatcacagtacgacggcaacccagcagcagccgccgccaccaccggtaccgcaagaagacgactcggtggtaatgcgctgccagacgcccgattacgaggacatgctgtgttacagcgatgatatggatgactaaaaagagagtgaagggtgttgtgcgtgatgattgctgtcccttatcccgttacaaagaaaaaatggtgttacacactccttggtactactatgacccgtggtgagatatccgatgatgataatgatgtacgcgtgcctgagcttggtgtttttttctctctgtgagcttttttccccataagctgtgtactgttcgtgtccggaccccatacacggttttcgttaatgacggccccctccttttcccccaccgtaaaaaaaaagcacaatacacatgtggttttttggttcgaatcgagcttggcgtttatttcttctcgagccccacgtcctctccctcccattcttatatatacacatgcccaagattgggggggaacgtgtgtcgtttccaggtcgtggtgacgatgatgatgtggtttttatcggggtggtagtacaagggtttgctactgtagtcgaaaaggtgggccgagaacatagaggaactaactcctaagcgatggctcaaaggcggatgagcaaatcattaaaatccttgactgtctatggttatgcaaaaggatatataaagtataaatagcgtatataaaaacatatatctatgtacaagacgcatgggataaataacacgtatttacacatttttctgcacatgtacaacatttgaggacgaggagacgacgaccggccggtcgccgccgccgcggttgctactactttcttaagtgatgcgaattggtggctatggtgaggagtttggaggaaataatatacatcatatattctgatgacagtgtagtaaacatttcactggctttggcccgatgcgacggagggccccgacgtcccctctcccggaggggggaagaggcacgacgagcgagggccccgtcgtacgaggaacaagaatcttcttcattctttcacagtaaagcacatttctttatgtggggacgggaatcgatgtcatttgtgtatttgcattcggtagagagctacagtctccagtttcacgatcgttgtgcatcatacaacgacactttttatcctacaaatttcacacctatctatatacacacaatataaggttatagcatcatctagtttgttcatttcatacctgttgagaacgtttatgttctagcaattgatttcgcgtcatagggctgtgacggtgattcttcagagaatcaggaaaaaaaaaagaggctcaacgagcaccagagactaagtcggaaaactcgcgcccgcttccccggacggtttcggcttagcctctggcctgcgatggtttttttattccaagttcgttccatgaatagagcgttatacgattgtgttttcgtgtcattcagacgtggttgatcatgttactacgtgtgtgttttttgctttggtcggtacacggtccctttcagcggacccagtgttccttggagagacgaaaagcgagcgtgtttcacgagatggctgatgccgagtgtcgtcgacataagtcattttctaaagaagcaacataaaaaaaagatgatgtggttcgtcgtactcacagtctcgtttagctactatagatattatagatccagagagcgtaccgcccgagagaacaccgtcttctccgggacgtcttgccgtcgtccgtcacccgggcgtcgagatgttcgtagagaacgatggaggacgaccaacaccgacaggtggtgctcatgagggtgtggtgtcgatggtgcgtttttttttgcctcggcacgaccgtatttgcccgtcttaccgcacctccggaaagatggtgtttttacgcaggtgggtgaggcagttttttttttcagatgacaacgatggtaccgatagagcctgagatgatgatggctacgaaggacgggcggacgggcaaacgatggtgagaggtcgccaccgaggggtgccttttttttttctggtcagatggaacgtcgtcggtctcgagcgccccccgatgtagggccgctctcttacgtatcccgggtcgattcagaccgacaaaaagagcgtccagagacgcggtctctttcttctcgaacggaaagtccgaatcctacacatttctagtcgtgacggctagctttttggtggtcatggcggtggtggtcaacatatatctccagatacaggagatgaggaaaaaaaaaggaggacaagtctaacggaataatatccgatcatatatatggagggatatcaggtcatcattgtgtatcaaaagatgatttgtacaacagggaaggatacggttttaaaggttagtgcagagaaactatataaagagcgtataacatggagttcattctgtcattaaaaaggttttaagtagagcatattaaaaatagacgagagctagagttttattcttggttcatcatatattttgtaaaaaaaaaaaaaaaaaaaaatagaaaaatataggtgccggacgccggctacgtcccagtccggggcttagcgcacccaaacgcaggtttcccccgttttcaaacacctcaagatcttttgagaaacacatatttttgttatacacagtgaaaacgtggggggacagagttccaaacacgtgtctatcaagcaaaaattcagacgatataaatatggagagttttttcttcttatacaacagcgacagttcggtgtacatagcgtataatatatataggtcacatacagacttatgagctttttaccaaacagatgcaaatcgcctaccggaggcgggatcgggcgtgaggttctggctgcacccgcccgatccctcgtcggcttctccggcggctgtcctaaaatgactaggttcgtatatagagctataggtctttcatgatactgatgagaaatctatggtttgcgcgtcttatctgaatatatctagcacgatatagacgatacacgtcaagatcattgtatcacttcttttcgtctacgtggtaagagtcttggatactaaatatgtatataggcagcatttatagtttcaaaggatagaagatagtttttggacactgatagatatggcgttgttgagcggttgtgttggatgaacttgtcatcattctgtattttttcacataaggtgttcttttcttcgagcagtttataaaaggggtcaggcgcgatgactagagggcgcactttgggtgcggtcctccatcgcttgtcaacaaccggatgtgactcagcgagcacgagatggtttgacgtcagcgacagttagccctcagggcgaaaacaggaagagtcgcctcgacggcgccctctaggtagcatcacggaacaggcggcgatcgcggactcgcctcggccagggggtaccgagggggtgcccgcgactcgcccctcctccaagatggcgccgctcggccagactcgtcgagattttcagggctatcattttttcgctctgagcagaaaaaaagctcttcaaaaacgtctcaaaaaagcacagaaaagttatcgtgctatttttttacccgcctggagcgaaaacgctcctcggctctcgacgccattttctctcgtccgccatgtcggagctcagaacggcatgacgagcgagagaaccgtcgagaaggtcaccaagatggcgccggttggggtgcggtcaaacggtgttttacagtttcggggccatttgaacagagaaaggtggggaattttgagggacacggttttgtcggatgggggataaaatcacgccctgtcgtcgtattgccgtcacgaattttttcggccgtctgcacccgtatcggttcacgggttttccacggcaaatcggagaagggaaaaaaaaggtggggcctgttcccttcccgggtctcggacgagtcgacacgccgggtgggacggtcgtggtctcctcggctcgtgccgggaccctccctgtggattcacggtgttccggacccctccaggaaagggtggaaaacgcgtggagcccacggggacgtgcgttcgtaccggggaaaaacccgactgggcctgaaccaacgttgggcgacctgccgggcccatcgtgtggggacagtgattatggaggggcgtactaacggcaattgaggtgtcatggcggcccaccgtcgaccccgagcgcttccggccacacccaacctcaccgccgcatcggccagcacacacgccacagcctagtggggtccgaggcgccgaccccggctgggcggccgatggggggaggggagtggggggaccacgcccagggccagcaagccgcgacggttcgggcggagtttttggggagcagtgggggaggggagcgtcacgggaccggccaacgcccagggtaaggcggaccgagagccgacggctaggccgagggacccccggccacgaccggcgaccggaccctcgagaggggggaggggagcccaaccggagccaccgagagggagccgccgcgagacccggaagccgtcgcggtcgaccccgctcccggagctcctgactgggcccccagcccccaaccctccggggccgactgccgtcgagccggggcgtcgcccgtccccaccaccgtccgcccggcccacctaccgtcgtcgtcggccggccgccgcgacccccagccggaaaaagagcccggagggacccaaaagccagcggggcgagccgggaaggggagctgggtgggggatccccggtcgcccaccgcggaacgagcctaggaaccggggtccgcgacccagccccccgtggggggaggggaagggcgcggaccccgggtcccgtccgttccgcggcgggtggaccgggaagccggcggaggtcgccgggagcagcgagggatcccggaccggagcccggggaggagcggggtggggctgggaagcccccgctcgggtccccccgggccgcggacgggaaccgggaccccggtgcgggggtcccagcccggccgggccgtcggatggggggtcgagcggggggaggggagggacccccggccgaggtccggagcgggccgcgcccggtgcccggcccacggccccggatggtgctccagggcggtgggacgggcccgcggacggaccggcgccgggcctcggccggggagggtggggggtagggcgggaggcaggcgagagcgggcgcagcgtgcggaccgcagcacggccggaaccctgccgcggactgcgccggggggcggcgggcacgccgggttttataggttctcagaggccccgcctaggtgggcggagcggtaattttccaccgccgcggcccatgcccggcacggggctcgcgctccctaggtgcggccgcccagtggaaaaataccggcgcatgcgcacgaagcgcatccaatggaaatttaccgacgcatgcgcactgaccgcctccagtggaaaaataccggcgcatgcgcacgatgcatgcccagtggaattttaccggcgcatgcgcagggcgcgcctcccgcgggtcctggcccgcgcatgcgcaccgggtcccctggtttaaccctctttatatataggctttccatacgacatccccggcgcatgcgcactcgaggccacatcccataatccgcgtggcaacgccctaacaaccgaaaattcgccccgactgcgcatgtgcacggaaacgccgtcccattggaaatcatggttgcccaaatttggtaaaaatttgccccccccggttccggaggagaagggggggggtgaggggggggggttacggtggttcccgttccgccagtccgttttcgtagaacgtttcgttagaagaattatgctatatagggtatgcatcctaggggtggaagctaggctccgcccctacggggcgtcgcctagcatccggtatacgtaaaacggactgatgacgtagctcgcttcgctcgctacgtcatcagagatgatttccgccggagatgacgtacgcatacgtgacgtagctcgctacgctcgctacgtcaccgtatgtccggaattccacaggatgacgtatatccggagtgggtgtggtcacgcgagtgtgacgtgagcttgccaggggtcacgtgagaagcggcggcgttaagtttactaggccaaaacagaggaagggggcggataccctaggtaagggggcgtgcacgtagccctgtagacactcccccctagggtccagtagcttatgacgcgtatccgggagtagcgtctacgtcagcaggtgtatatttccggtagacggagaagcctgtacgtacaccgaggacggtggaaccctaacgggttccacctatctgaaatttccgtacaaggggtggagtctagggagggctcattgtatatccgtttctgtgattggtagataaggtggcgtacctaggggtgtggctgtatacgtaagcggatatagctacacgtaatgggtgtggcttcactagggatcgctgtattctaccgcgcgcgcgtgcgtgcgcgcgcgtgacgtaacaaatcaccttgtgattatgacgttggcatctggcaccgcctcttgggcggttctacgggtctcgcttcctgcgccgatggtcacgtgaccaacaaaagtgctcaccgcctcgccggccacggggtttatgcctgttcttatgcagacaccagatggcgctcgttgatcgggaaagctgtctacgcgggttttacagtgtatttttgcgtcattgtgacgtagagccgacgatcgccacattcgatggtgtacgctcgccgccagatgtcgtcaggttgtacccaaaaccccgttatgattacacgctggcttccgcattcttggacacggcggtttcaggttacattacatcaagccgcgacaacgccccgaacaaaaacaccgggcaccgttatgtatacacgacgtcgatactgatcgccgtagtgacgtcagttgacacacaacaccgttccccatcacggtgtttcatggcaatgggcgagagttactttttacaagacgaaaaatgtgttttttggtaaaaaagaggggggatggggaaataaaaatacacaattttaaagttcggatcttttcctgttttattgactcgtaaactgtaaggtcttcgagtacgtgtcgggggtctgtgccgcgtacgtgttcgggaaaccacgtaacgtggtttgtgtcgtgttgtgacgttgagataatacacgtttggcgcccataggcgcgcgggtttttggggtgtgtagcttgtacggcgttttgtcggcggagcgcagcgaaaattggtggtgatagcggtgattgaggttgcgagatcagatccaccgcgcttgtaccaccgtggtgcggtgtttctgcttgtaaaccgtcaggtggttctttgtgatttaaaaacaccgtgttcgtgaaacgtgacttttcacggtttgttagctgatgtgattttggaggccacaaacaccgtacggtgttttcggggatcgggctcgggatttgcctgtgtggcccggtgacggtaggacagaaaacaccgttttctagggacggtgttttcacgtgccctgtgtggggtttttatgtgctgcttgtgcgactgagtgggaaaacgggttgtgaccggacggtgtgctgaggataaacgacgtgtgcagctaccgacgttagtttgcggtgacgcaaagctgtcccgaacatcacgctattttcgcgggcgggtgcgtcggctagcggtctggctgcgagaggctgcccgaccgtaacggttagcttttctcacgaattgctgggatcgttgcggttgtcgcctttggtggtccgcaaccgcagccagaccgcagtggtggccacggtggtgtctcagacgtcgtgcgtcaaacatgacgtgctgaacttttccttggtataaaattcactcagtggcggcgtagccattgtcttccgttcatccaccatgagccacgaggaactaaccgcgctagcgccggtggggcccgcggcttttctctacttcagcaggttgaacgcagaaacgcaggagattctggccactctctcgctatgcgaccgttcctcgagcgtggtgatcgctcctctgttggcggggctcacggtggaggcggatttcggcgtctctgtgcgcacgcctgtgctttgttacgacggcggggtgctcacgaaagtcacgtccttttgtccttttgcgctctactttcatcatacgcaaggcatcgtggcttttaccgaggatcacggagacgtgcatcggctgtgcgaggacgcccgccagaagtacgcgttggaggcctacacgcccgaggcggatcgcgtgcctaccgatctggcggcgttgtgcgcggcggtgggctgtcaggcgtccgagacgactgtgcacgtggtggtgggcaacggcttgaaggagtttctttttgccggtcagctgattccatgcgtggaggaggcgaccacggtgcgactgcacggcggcgaggcggtgcgcgtgccgttgtacccgcctacgctctttaattcgctgcagcttgacgccgaagccgacgaggtctcgctggatgcgcgcagcgcttttgtggagacgcgagggctctacgtgccggccgtaagcgagacgcttttctactacgtgtacacgtcatggtgtcaatcgctgcgcttctcggagccgcgtgtgctgatcgaggcggcgttgcggcagtttgtgcacgacagtcagcagtcggtgaagctggcgccacataagcgctacttggggtacatgagccagcgactcagcagtctggaaaaggatcatctgatgctgagtgacgcggtggtttgcgagttggccttcagttttgcctcggtatttttcgattcggcctaccaacctgccgagtctatgctcttttccgagtggcctttagtgaccaacgcaaccgatcaccgcgatctgatccgcgcgctgaccgagctcaagttgcatctctcgacgcacgtggccgccttggtcttcagcgctaattcggtgctctaccagcacaggctggtgtatctccagtcgtcggcgcggcatcccagcgccggcggtacggccagtcaggagacgttgctcaaggctattcagttcaccaacgggttgtcggcggcctgcgaagacgtctacaacgacgcgcgcaaggtgctcaagtttcaaggcgcgccgctcaaggacgaacgctatgggccgcagcatttggcgttggtgtgtggcacgtgtccgcagctagtttcgggcttcgtctggtatctaaatcgtgtctcggtgtataatacgggcttgtcgggttcgtcgacgctcacgaatcacctggtgggctgcgccgcggggctgtgcgaggcctgtgggggtacttgttgccacacgtgttatcagacggccttcgtgcgggtgcgcacccgcttgcccgtggtgcccaagcagcccaagaaggagccctgcgtgatcaccgtgcagtcgcgttttctcaacgacgtggatattttgggcagcttcggtcggcgttacaacgtcgacgccaaggacgggggtttggacggcaaaggtgacgacggggttccgggcggcggtgctggcgggggtggtggacgagacgtgagcgggggcccgagcgacggtctgggcggcggtcgtggtggtgggggtggcggggattccgggggaatgatggggcgcggcggtcgcatgctgggcgctagcgtggaccgtacctatcggctcaatcgcatcttggattactgccgcaagatgcggctcatcgaccccgtgacgggcgaggatacctttagcgcgcacggcaaaagcgactttgtggccgtcttttcggcgctcaacaagtttgtggacgacgaggccctgggtttcgtttcggaggtgcgcctcaagagcagccgcgacgaggtggcgggcgccacgcaggccttcaacctggatttgaatccctacgccgtagccttccagccgctgctggcctacgcctatttcagatccgtcttttacgtgatccagaacgtggcgcttattaccgctacctcatacattgtggacaatccgttgaccaccaacttggtatccaaatggatgacgcagcattttcaatccattcacggcgcgttctccactacgtcgtcgcgcaagggctttctcttcaccaagcagatcaagtcgtccaagaattcggatcatgaccgtctgctggactttaggctgtacgcgcagggcacgtacgccgtggtgcccatggagatcaagctctcgcggctgtcggtacccacgttgatcatggtgcgagtgaaaaaccgacccatctaccgcgcgggcaagggcaacgcggggagcgtgttttttcgccgcgatcacgttccgcgtcgcaatccggctaagggctgcttgggattcctgctgtatcgacatcacgagcgactctttcctgaatgtggtctcccctgcttacagttttggcagaaggtctgttccaacgcgttgcccaagaatgtgcccataggtgacatgggcgagttcaatgctttcgtcaaatttctggtggctgtgacggctgactatcaggagcacgatctgctggatgtggcgccagactgtgtgctgagttacgtggaaagccgtttccataacaaattcctctgctactacggcttcaaagactacatcggctcgctgcacgggttaacgacgcgtttaacgacgcagaaccacgcgcagtttcctcacgtgttaggtgctagtccgcgtttctcgtcgcccgccgaatttgcgttgcatgtcaagggcttgaagaccgcaggcgtgccggcgcccatggccgccactgtggcgcgtgaatcgttggtacggagcgtttttgagcatcgttccttggtgaccgtgcccgtgagcgtggaaaaatatgcgggtatcaacaacagcaaggagatctatcagtttgggcagatcggctacttttcgggcaacggtgtggaacgcagccttaacgtgagctctatgagcggccaagattatcgtttcatgcgccagcgctacctcttggctacgcgtctggccgacgtgctcatcaaacgctcgcgccgcgagaacgtgctttttgacgcggatcttataaaaaatcgcgtcatgctggcgctggacgccgagaacttggattgcgatcccgaagtgatggccgtgtacgagattctgagcgtgcgcgaggagatccccgcgtccgacgatgtgctcttcttcgtggacggctgcgaggcgctggccgcgtcgctgatggacaagtttgccgcgttgcaggagcagggcgtggaggacttttcgctggagaacttgcgacgcgtgctggacgccgacgcccagcgattgacggacgccgccgggggggaggtgcacgacctgtcggcgctcttcgcgcccagtggcgtcggcgcggcgtccggcgtcgggggtggcggtcttcttctcggcgagtccgtcgcgggcaactccatttgcttcggcgtgcccggcgagacgggaggtggctgctttctcgtgaacgccggcgaagacgaggctggcggcgtcggcgggagcagcgggggcggcgggggcagcgggttattgccggccaaacgcagccggttgtaaccgccagcaaacgccgcgacaacggccgccgcagccacgagcgttgcaacaacagcagcaacagtcgcagcccccgtggccgcttttcagaccgcaacaacagcagcaacagcagccaccgacacagcagcaccaggcgataccgtatcagctaccgccgcaacagcggcgacagacggcgtcgcatcatcaacagcagcaacagccccgaaggttagcgccgcggcaccagagacagagaccgccgccgcgctggcaaactccgacattcgcgtcggcgcccgggccgcctgaggaaggggaggagtgtcagacacagccggtcatctccgagcccccgtcgcccgaggcggaggagccggcggcggcggtggtggaggaggttgcgccgcaagcggcggcaacagcttcgggagcagaacccgcgtcgtcgacgacgtcgttatatattaacgtcaacgtcagtcggcatagcgagcggcccgcgagttatttgtgcaccgactccatgtctctggccggcgccagaccggacgacagcgtctcgtacgtgagcgagtcgagtcatggagatgaatttgttacagaaactatgcgtagtgtgttcgaaatgcaacgaatacgccatggagctggagtgtctaaagtactgcgatccgaacgtgttactggcggagtccacgccgttcaagagaaacgcggcggctatagtgtatctgtaccggaagatctacccggaggtggtggcgcagaatcgtacgcagagttcgctgctgacgctctatctggagatgctgctgaaggcgctgcacgaggatacggctttgctggatcgggcgctgatggcctactcgcgccagccggaccgggcggccttctaccgtaccgtcctccgtttggatcgctgcgatcgccatcacaccgtggagctccagtttacggacaacgtccgtttcagcgtcagtctggccacactcaacgacatcgagcgcttcctgtgcaaaatgaactacgtgtacgggatcctggcgccggaggccggcctggaggtctgcgcgcagctgctggagctcctccgtcgcctatgcggcatctcgccggtggcgcgtcaggaagtgtacgtcgaagggacgacatgcgcccaatgctacgaggagctgaccatcatcccgaatcagggccgctcgctgaacaagcggctgcagggcttgctgtgcaaccatatagcggtccaccgtccgtcaagccagtccgatgtgaatatccagacggtggagcaggacctgctggacctgacaacgcgcatcccccacttggctggagtcctttcggccctcaaaagcctattctcttcttcatcggcctaccacagctacatccaggaggcggaggaggcgctgagggagtacaacctgtttacggatataccggaacgaatatattccttgtcggattttacctactggtcccgtacctcggaggttatcgtcaagcgggtgggcatcaccatccagcagctaaatgtgtatcaccagctgtgccgggcgctcatgaacggcatcagtcgccatctgtacggggaggacgtggaggacatcttcgtgctcggggaaaaggcgttggacggggaggagcgcatgttcgtggggtcggtctttgccgcccccaacaggatcatcgacctcatcacatccctcagcattcaagctttcgaggacaacccggtgttcaacaagctccacgaaagcaacgagatgtacaccaaaatcaagcatattctcgaggagattcgacgtccgctgcccgatggcacggggggcgacggccccgagggcgaggctattcacctgcgtggacgggaggcgatgtcggggacgggtacgactttgatgacggccagcaacagcagcaacagcagtactcacagtcagaggaataacggtggcggcggccgggctcgtggaggaggcaagaaagtggtagggggaggggtgaatgggcaggacggcgacggcagcgagaacggcttacgggtgcgcaactgcgatgaacacgaggctctcgacttggtggacgcgcgttcccgcatccacaacgtcacccgcgaggtgaacgtgcgcaaacgcgcctacctgcagaaggtctcggaggtgggctatggcaaggtgatccgttgcatcaaaacgcaggagcgtctgactagcaaactcatcgatgtcaacctagtggggcccttgtgtctggactttatctctaagctcatgaatgggtttctataccgcagccaataccaccaggaccaagacgtggtggacgtgggggatcagtttacctatgatgagcacctgtatgtggtcaataacctgatccacaagagtctgcctgtggaatccctcccgctactgggtcagcagatctacgagttgtgtaacgggcctcttttcacccactgcaccgatcgctatcccctctctcacaatgtggacatggcctatgcctgcgacaacgcgggcgtactaccccatgtcaaggacgatttggtcaaatgcgcggaaggtaccgtgtatcccagtgagtggatggtggtgaagtacatgggttttttcaatttttcggactgtcaggacctaaacgtgctgcagaaggagatgtggatgcacgtgcgggagctcgtgctctccgtcgcactatataatgaaactttcgggaaacaactctcgatcgcgtgcctgcgcgacgaactgcacccggacagagatgtgattctcacgtataacaaagagtggccgctgctgcttcgtcacgaaggaagtctttataagtccaaagatctatatctcctcctctacaggcatctgtccagaccggatgagagtggcgacgtgccaacagctcccgtggccaagccctccaccctgacggccgccgcggccgtctcgggcgtcttcagggagccggaccgaccttggctgccaagtccgtatccctcctcctcgaccgcgggcgtttctcgaagggtccgcgcaacacgcaagagaccacgacgcgcctcatcgctgctggatttggcccgcgacgaacatggaatccaggatctggtgcctggtagtctgcgttaacttgtgtatcgtctgtctgggtgctgcggtttcctcttcttctacttcccatgcaacttcttctactcacaatggaagccatgcttctcgtacgacgtctgctcaaacccggtcagtctcttctcaacacgtaacgtcttctaaagccgtcagtcatagagccaacgagactatctacaacactaccctcaagtatggagatgtggtgggggtcaacaccaccaagtacccctatcgcgtgtgttccatggcccagggtacggatcttattcgctttgaacgtaatatcgtctgcaccccgatgaagcccatcaatgaagacctggacgagggcatcatggtagtctacaaacgcaacatcgtcgcgcacacctttaaggtacgggtctaccagaaggttttgacgtttcgtcgtagctacgcttacatccacaccacttatctgctgggcagcaacacggaatacgtggcgcctcctatgtgggagattcatcatatcaacagccacagtcagtgctacagttcttacagccgcgttatagcaggcacggttttcgtggcgtatcatagggacagctatgaaaacaaaaccatgcaattaatgctcgacgattattccaacacccacagcatccgttacgtgacggtcaaggatcagtggcacagccgcggtagcacctggctctatcgtgagacctgtaatctgaactgtatggtgaccatcactactgcgcgttccaagtatccttaccattttttcgccacgtccacgggtgacgtggttgacatttctcctttctacaacggaaccaatcgcaataccagctactttggagaaaacgccgacaagtttttcattttcccgaactacactattgtctctgactttggaagagcgaattctgcgccagagacccacaggttggtggcttttcttgaacgtgcggactcggtgatctcctgggatatacaggacgagaagaatgtcacctgtcagctcaccttctgggaagcctcggaacgtactattcgttccgaagccgaagactcgtaccacttttcttctgctaaaatgactgcaacttttttgtctaagaaacaagaagtgaacatgtccgaccccgtgttggattgtgtgcgtaatcaggctctagataagctacaacagatcttcaacgcctcgtacaatcaaacatacgaaaagtacggtaacgtgtcggtttttgaaaccacaggcggtctggtggtgttctggcaaggtatcaagcaaaaatctttgttggaactggaacgtttggccaatagctccggtgtgaactccacgcgtagaaccaagagaagtacgggcaacacgaccaccctgtcgcctgaaagcgaatctgtacgaaatgtgctctacgctcagctgcagttcacctatgatacgttgcgcagctacatcaatcgggcgttggcgcagatcgccgaggcttggtgtgtggatcaacggcgcaccctagaggtcttcaaggaactcagcaagatcaatccatcagccattctctcggccatctacaacaaaccgattgccgcgcgtttcatgggtgatgttctgggtctggccagctgcgtgaccatcaaccaaacaagcgtcaaggtgctgcgtgatatgaacgtgaaagaatcgccaggacgctgctactcacgacccgtggtcatctttaattttgtcaacagctcgtacgtgcagtacggtcaactgggtgaggacaacgaaatcctgttgggcaaccaccgcactgaggaatgtcagtttcccagcctcaagatcttcatcgccgggaactcggcctatgaatatgtggactacctcttcaaacgcatgattgacctcagcagcatctccaccgtcgacagcatgattgccctggacatcgacccgctggaaaacactgacttcagggtactggaactttactcgcagaaagaactgcgttccagcaacgtttttgacctcgaggagatcatgcgcgagttcaactcgtacaagcagcgggtaaagtacgtggaggacaaggtagtcgacccgctaccgccctacctcaagggtctggacgacctcatgagcggcctgggcgctgcgggaaaggccgttggcgtagccattggggcagtgggtggcgcggtggcctccgtggtcgaaggcgttgctaccttcctcaaaaaccccttcggagccttcaccatcatcctcgtggccatagccgtcgtcattatcatttatttgatctatactcgacagcggcgtctctgcatgcagccgctgcaaaacctctttccctatctggtgtccgccgacgggaccaccgtgacgtcgggcaacaccaaagacacgtcgttacaggctccgccttcctacgaggaaagtgtttataattctggtcgcaaaggaccgggaccaccgtcgtctgatgcatccacggcggctccgccttacaccaacgagcaggcttaccagatgcttctggccctggcccgtctggacgcagagcagcgagcgcagcagaacggtacagattctttggacggacagactggtacgcaggataagggacagaagcccaacctgctagaccgactgcgacatcgcaaaaacggctaccgacacttgaaagactccgacgaagaagagaacgtctgaaccaggagaagaaaaaaaaacagacaaaaaaagtgacacagagacttgtgatatacggggttaaactggatatctaggtgctgcatgtgtattttctttgtgattttgcttcgtaagctgtcagcctctcacggtccgctatgtttttcaacccgtatctgagcggcggcgtgaccggcggtgcggtcgcgggtggccggcgtcagcgttcgcagcccggctccgcgcagggctcgggcaagcggccgccacagaaacagtttttgcagatcgtgccgcgaggcgtcatgttcgacggtcagacggggttgatcaagcataagacgggacggctgcctctcatgttctatcgagagattaaacatttgttgagtcatgacatggtttggccgtgtccttggcgcgagaccctggtgggtcgcgtggtgggacctattcgttttcacacctacgatcagacggacgccgtgctcttcttcgactcgcccgaaaacgtgtcgccgcgctatcgtcagcatctggtgccttcggggaacgtgttgcgtttcttcggggccacagaacacggctacagtatctgcgtcaacgttttcgggcagcgcagctacttttactgtgagtacagcgacaccgataggctgcgtgaggtcattgccagcgtgggcgaactagtgcccgaaccgcggacaccatacgccgtgtctgtcacgccggccaccaagacctccatctacgggtacgggacgcgacccgtgcccgatttgcagtgtgtgtctatcagcaactggaccatggccagaaaaatcggcgagtatctgctggagcagggttttcccgtgtacgaggtccgtgtggatccgctgacgcgtttggtcatcgatcggcggatcaccacgttcggctggtgctccgtgaatcgttacgactggcggcagcagggtcgcgcgtcgacttgtgatatcgaggtcgactgcgatgtctctgacctggtggccgtgcccgacgacagctcgtggccgcgctatcgatgcctgtccttcgatatcgagtgcatgagcggcgagggtggttttccctgcgctgagaagtccgatgacattgtcattcagatctcgtgcgtgtgctacgagacggggggaaacaccgccgtggatcaggggatcccaaacgggaacgatggtcggggctgcacttcggagggtgtgatctttgggcactcgggtcttcatctctttacgatcggcacctgcgggcaggtgggcccagacgtggacgtctacgagttcccttccgaatacgagctgctgctgggctttatgcttttctttcaacggtacgcgccggcctttgtgaccggttacaacatcaactcttttgacttgaagtacatcctcacgcgtctcgagtacctgtataaggtggactcgcagcgcttctgcaagttgcctacggcgcagggcggccgtttctttttacacagccccgccgtgggttttaagcggcagtacgccgccgcctttccctcggcttctcacaacaatccggccagcacggccgccaccaaggtgtatattgcgggttcggtggttatcgacatgtaccccgtatgcatggccaagactaactcgcccaactataaactcaacactatggccgagctttacctgcggcaacgcaaggatgacctgtcctacaaggacatcccacgttgtttcgtggctaatgccgagggccgcgcccaggtaggccgttactgtctgcaggacgccgtattggtgcgcgatctgttcaacaccattaattttcactacgaggccggggccatcgcgcggctggctaaaattccgttgcggcgtgtcatctttgacggacagcagatccgtatctacacctcgctgctggacgagtgcgcctgccgcgattttatcctgcccaaccactacagcaaaggtacgacggtgcccgaaacgaatagcgttgctgtgtcacctaacgctgctatcatctctaccgccgccgtgcccggcgacgcgggttctgtggcggctatgtttcagatgtcgccgcccttgcaatctgcgccgtccagtcaggacggcgtttcacccggctccggcagtaacagtagtagcagcgtcggcgttttcagcgtcggctccggcagtagtggcggcgtcggcgtttccaacgacaatcacggcgccggcggtactgcggcggtttcgtaccagggcgccacggtgtttgagcccgaggtgggttactacaacgaccccgtggccgtgttcgactttgccagcctctacccttccatcatcatggctcacaacctctgctactccaccctgctggtgccgggtggcgagtaccccgtggaccctgccgacgtatacagcgtcacgctagagaacggcgtgacacaccgctttgtgcgtgcttcggtgcgcgtctcggtgctttcggaactgctcaacaagtgggtttcgcagcggcgtgccgtgcgcgaatgcatgcgcgagtgtcaagaccctgtgcgccgtatgctgctcgacaaggaacagatggcgctcaaagtaacgtgcaacgctttctacggttttaccggcgtggtcaacggcatgatgccgtgtctgcccatcgccgccagcattacgcgcatcggtcgcgacatgctagagcgcacggcgcggttcatcaaagacaacttttcagagccgtgttttttgcacaatttttttaatcaggaagactatgtagtaggaacgcgggagggggattcggaggagagcagcacgttaccggaggggctcgaaacatcatcagggggcttggacgaacggcgggtggaggcgcgggtcatctacggggacacggacagcgtgtttgtccgctttcgtggcctgacgccgcaggctctggtggcgcgtgggcccagcctggcgcactacgtgacggcctgtctttttgtggagcccgtcaagctggagtttgaaaaggtcttcgtctctcttatgatgatctgcaagaaacgttacatcggcaaagtggagggcgcctcgggtctgagcatgaagggcgtggatctggtgcgcaagacggcctgcgagttcgtcaagggcgtcacgcgtgacgtcctctcgctgctctttgaggatcgcgaggtctcggaagcagccgtgcgcctgtcgcgcctctcactcgatgaagtcaagaagtacggcgtgccacgcggtttctggcgtatcttacgccgcttggtgcaggcccgcgacgatctgtacctgcaccgtgtgcgtgtcgaggacctggtgctttcgtcggtgctctctaaggacatctcgctgtaccgtcaatctaacctgccgcacattgccgtcattaagcgattggcggcccgttctgaggagctaccctcggtcggggatcgggtcttttacgttctgacggcgcccggtgtccggacggcgccgcagggttcctccgacaacggtgattctgtaaccgccggcgtggtttcccggtcggacgcgattgatggcacggacgacgacgctgacggcggcggggtagaggagagcaacaggagaggaggagagccggcaaagaagagggcgcggaaaccaccgtcggccgtgtgcaactacgaggtagccgaagatccgagctacgtgcgcgagcacggcgtgcccattcacgccgacaagtactttgagcaggttctcaaggctgtaaccaacgtgctgtcgcccgtctttcccggcggcgaaaccgcgcgcaaggacaagtttttgcacatggtgctgccgcggcgcttgcacttggagccggcttttctgccgtacagtgtcaaggcgcacgaatgctgttgagaaacagcggcggcggtggtgactggggacggtgatgatgctgctgagactgagactggtggtgagagtagtggtggggctgcgtcgcctgcgacggcgggtggagatgaggcggcgtggactgggacgaggaggaggggccgcagccgttggtggaaactacgtgcaacggcgacgcggttaagggagaccgtatcgcgtaggacgacgtggcctcctcgtataggttgctgccgctggactgacacagctcctgaatgagctctttgtagcgctcaaaggactcgctcacgtcgttgggaatgtccatctcgtcaatcttgcgttgcaaaatagtcacgtcgatcttgacgctgctggccgagacggcgtgacacagcacgctgataacgacgtggtcgcgcacgatgttgagcgtgacgctgtagtcttcgcgcgccgccgtgagcatctgcgtgatgcagtcgcaggggatgtgcacgtcggggttttcgaagatgacgtgcatgtgcaaccggccgtcctcggcgtgcataaagggcacgatgtcgtggttggcggcgtgcagcaggtaataaatttggaagatgggcggctggttggtggagagcttgagtagctcgctgctcttacagaacccgtaataaaagtttctatttttcatgatgttggacgtctgattgatgaaggccaccatggcgtcggaggcggtgggcaggatgcggttgtcctcgcacgaggtgcaggcgatgcgcgagacctgctcgttgccgtacggcgagatgtcgaggcaggtgtgctgccggtgcgagtggaaattgaagggtaagcagatggactctttgcccgtgatggccatcttcatcatgttgaggtacttgagctccagttcggggtgctcgcggaagatgtcgtgcaggtcgtgcagcgtgaggcgcgggcgcgcgtcggccggcgacggcggttcgccgtggttgttggccgacgtagcgccgttcaccgtcgacgccactttgctggccagttcgcgttggcggcgcttgcggagcagggagcgcaaggccgagcgtcgttcgcgcggcgtgcgcacgccgctcacgctagacatacttgtctatcacgtacgtggggtccaccagcttgatgtcgcaactctccaacagctgcgtgaaatcgcgcataaagtccgccaggtgcactttgcctttgtaggtgcgttttgtaatctgaaaggccttgaagagtgtgatgcagagccacacacgtcgcggaagtcgacttatatagtaattgtcgtgacagatggccagtttcacctcctggacgtggtgggggtgcaggcgtccgaagagcacggcctcgttggtgacgcggatgttgccggcgcactgcgggtcgcagaaaaagtgcttgtagatgcccgtgacgcctgcctgacgcaggacgtggcaaaataccgggtcgggtcgcgccagtgcgccgtcgacgccgctcaggccgtggtagtccgagtcgcctccgggcgaggtgggtgcttcgagtccacagcgcgccacgtcctcgtgtgccgcgccgagcggcgacgtgcattcgcgcaacagatcggccaataccagctgaatgcggtccaccatcttcacattgttctgacaatacgagacgacgcggcggtacagctcgcgcaggacgacgttatcgtaataggagcaggccatgagttcgcacagcagacacacggtactggtttggttcttggtaaaaaaagcgggtacgggacataggtaaatgggacccacgtttttttttagcgtgctctcgctgaaccccccgctggtgccaccgccgttgtgacggcccggatcgtctcctcctttttctccttcttcatcctcctcttcttctatcatcatccttgcgtcttctctttccgaggccgtggataacgcgtctagtcgcgcgaacttagtgtgcgtgagttccgtgagtggcgtggtgctcatgacgccggtgccggcccacatatagaaaagcagctgcacgaagcggtcgcggctaggtgagctgtgttctagaaagttgtcgatcagttcttgcggcacttcgacgtgataagggttggttttttgcttctgttgcgggtggcgccgaggcttgttgtaaggcaccgtgtcttcgcccatgaccatggcccgcaccacggccagatgattcagggtgacattctcgttatcaaccgcgtcgcccacttgtttttcaaagcaacgatttatgaagaagtgcaggtggaaatcgaagaccgtgagaacgtggtgtcggaacaggtcgtcgatgcgcagatcggaaaagtgctgctgcagcagatgcgtaaactcggacatgatgatgagcgtgctgagcgctgcacggggcgcgtaactgcatttgaagcacagcaagctgtactcgaggagccagctctggtcgcagtcttgtttgaggcagatgctgatgatggcgcataggttacagcgcgtgtcgatggccagcggcgcgcacagtcgccgcagttgttcaaagtcggccgccgaggtttcgaggccggccagttctgcatctaggtcgcaggcggccgaagcgccggcgggtcctgcgttgctactgccggcgacggctccgccgcagttagtggtgttggtcgcattggtgagtacggtggattgcgtgccgccgcacgtggtttcttccgcacagcagttgagcagttcgtctacctccgaggtgccgaggctgagcgtctggaattcgtaatgacggtaacggttggcggggtgttgaggattcacctggtatgaggcggccgccgcggcggccagcgcttcgtccataggtacttgacgtgggtgcgcgtgccatagcagctcagttgtcaagtccgagtgccactgggtgtactcggtgctccagccgctgtaacgtgaaacggcctgtcgttgcggactgcacaaggtagcggcggcgacggagctggtggacggggccgggctggtcgggggaagaaacgtggtgtggggcccgtgagggggagtcgttgggccgttactgctcacgtgggtactcggattcatggcgatcggcgccgctgattgaggacgcggaaaaagaatgtcctgggctaagcagcgggtgccgtttctggacgatgacgacggagaggaggaaaacgacgtgcaggatgacgtggattctccggtgccgacgcgaccactggtgatcgacgaggacgcggagcccgcggctggtacgagcggtgggctcgaggggggaggtggtgacgacgaggacggtgaagacgggcacgcgctacccgatcttgacgacgatctgctattacagttcgagccgatgctgccgcgcgtctacgatctgttgctgccctctctggacgcgcgcttaaatttcgtgaacgcgggtcagaagtacgccgccttcctcaagtacgtgcacggcgactgcgcgacctgcagtcacggagagatcctccgcgagaagacgcaactattaacggcgatcgtcagcaagctcatggacattaacggaatcctggagggaaaagacgagccggcgccgggtaaataaatcggcggtggcgtcggtgcgatggagatgaacaaggttctccatcaggatctggtgcaggccacgcggcgtatcctcaagttgggtcccagcgagctgcgcgtcaccgacgccggcctcatctgtaaaaaccccaattactcggtgtgcgacgccatgctcaagacagacacggtctattgtgtcgagtatctgctcagctactgggagagccgcacagaccacgtgccttgttttatctttaaaaacactggctgtgccgtctccctctgctgttttgtgcgagcgcccgtcaagctcgtctcgccggcgcgccacgtaggtgagttcaatgtgcttaaggtgaacgagtcgctcatcgtcacgctcaaggacatcgaggagatcaagccctcggcctacggagtgctgacgaagtgcgtggtgcgcaaatccaattcggcgtcggtcttcaacatcgagctcatcgccttcggacccgaaaacgagggcgagtacgagaatctgctgcgcgagctgtacgccaagaaagccgcgtcgacgtcgttggcggtccggaaccacgtcaccgtaagcagtcacagcggcagcggtccgtccctgtggcgcgcccgcatgtcggccgcgctcacgcgaacggcgggaaagcggtcctctcggaccgcatctccccctcctcctcctcctcgtcatccgagttgctctcccaccatggtcgccgctggcggcgccgctgccgggcctcggccgccgccgccacccatggcggcggggtcgtggcggctgtgtcgttgtgaggcctgtatgggacgatgcggatgcgcaagcgagggagacgctgatgaagaggaggaggagttgctggctctggcgggagaagggaaggcggcagcggcagcggcgggccaggatgtcggagggtccgcgcgtcggcctctggaggagcacgtgagtcgtcggcgaggggtgtcgacccatcaccgtcatccgccgtctccgccgtgcgcgccgtccttggagcggactggttatcgttgggcaccgtcatcgtggtggcgagcgcgctccgggccatcgcgaccgcagtctgggccgtggctgcccgcgcgctttgcgactctgggcccgctggtgctggctctcctgctggtgctggctctgctgtggcgcggtcatggccaatcgccgtctccgacacgctccgcacaccgcgactgaggagttccaccaggctctgcgccgtctcttcgcgcccctctgcgttcacgaggaccatttccatgtgcagctggtgatcggccgcggtgcgctgcagccggaggaagcggcggtagaaacgtcgcagccaccggcgcagtttgcggcgcagacgtcggcggtcctccagcagcagctggtgcatcacgtgccacgttcttgcgtccttcatctcttcgtgacggataagcgctttctgaatcgcgagctgggcgaccgtctctaccaacgcttcctgcgcgaatggctggtgtgtcggcaggccgagcgggaggcggtgacggcgctttttcagcgtatggttatgaccaagccctactttgtgtttctcgcttacgtctacagcatggactgtctgcacaccgtggccgtccgcacgatggcctttctgcgtttcgaacgctacgacaccgactacctgctgcgccgtctgcggctctacccgcccgagcggctgcacgcgttgttggacggtgtcacctcctcgctgctaggtgaccttcaccgattccttttcggggtggaccttcggctgcccgtgcttcaccccaccagctcgccgtgcctagcactactacgcgccaagcgcttcgacgcccgcgctgatttggccgtataccaccgtaaccagtggtgtcaccaacggcagccgcggtcgccgcagctgcggggcctcatcgcagccttgcgccggcacgccgggaaggtaccctgcggaaacccgctctacgtactggcccgacaagcggtgcagacgttttgcgacacgtgtccgcgatacctggtgccgttgcgggcactgggtctgcacgacgagacgcgcggaggaggctcgacggcggcagctgcggcggtaggacacgcgggcgccggacagcaggcgcgtcacgtagagcccaccaagatcgtcctctttgcactcagcgccgcgctgcgcggcggcctcatcggcagcgtcatcgacctgccgctctggtgtctgtgtcgactcaagtgcgagcgccatctggacgcgcgctcgctggtggccgtggtctgtcggcagtgcggacactgcctcaacctgggtaaggaaaagctacactgccagcaaaactttccgctcaactcgatgttctattatcgggaccgtcaagaaaagagcgtcatcttcaacacgcacgccgagctcgtgcactgctcgctctgcggcagtcagcgggtggtgcggcagcgcgtctacgagctcgtctccgagacgctctttggacagcgctgcgtacgcgtgggctggaaagccgtgctgggcctcaacgcggcttgtgccgtgtacgatcaccggctggctttcgacgtcattctgccctgcgcggcacgcacctgcgactccactgtggtggtacgcggcgtgacggtcccgcgtctcctgcgcctcacttcgcacgggcacggcctgctgtgcgcgcgctgtcagacgggcgagtaccgcgacagctgtttggaaagcgaagacggcgccccgctgtgtcggggctgcgcgctggttaaacagaccgcctgccacgtcggcggccacattgtgcagcaggcgcgcggcggtttagcagcgacttcctcctcgtcctccccccacggcctgccccatgtctaacaccgcgccgggacccacggtggccaacaagcgggacgaaaaacaccgtcacgtcgtcaacgtcgttttggagctgccgaccgagatctcagaggccacccacccggtgttggccaccatgctgagcaagtacacgcgcatgtccagcctgtttaacgacaagtgcgcctttaagctggacctgttgcgcatggtagccgtgtcgcgcacccggcgctgacagcccaaggggaaaaagaatagcaagaataaatcaccgtgaaagtgatacgttgttttgtaacataaaaaacgataaaaatcctattgtttttattacccgctactgtcagtgtcggttacaaaagatagagaaaccgcatgtgttgaatagtgtcctgtacggattgcgccagttgtcgcaggtccaatcgcactagccgcagtatttctagagcactgaggacgttctgcgtgagcaccgtgataggcggcgaggcgaaactggtgctggcggcgccgggcgccacggccacaagttcatctcggcatagtggtgtttctcccaatcggttttcttgaaagacggacccgccaaaggcggtagagactaatgcagagtcggctgtccttgatgtatcgtcttgtacgtgatctatctgtccgtcgtcgtctgcggccgcggccgctcgatgacgatgtcggcgcggcggctgctgaactcgcgcgatgggtggcgggttttcacgcagaaactgaatattgactggcacgcggttgaaaggtaccggcggtgtcggagcggcgccagacgcagcgacgttgtccgcggatgagttatcatcttggtcatacagcgggaaggtggggaaggcctcgtccaacaccagccgactgtggtcctgttcgaacgtggagggcggtcgcagcacgcgtacgacggtgtggtcctgtgcgttgtaaatgactaggggaataaactctaagcgggtggggaaacgcaggtaatcgcgtagccgtctgatttgggcttgtagccagcagtgctccagcggcgtttcggtccacgtgtcctggagcagttgactgagattgagatcccgggagcgttggatgcggaggaagtcgcggtctcgcgacgtgtattcgaggtggcgcgctactagtatacgttgacctttcagcaggtcggctacatgcacgccgagacacacgggtatgccgaaaagccaggagcccagcgcgtagtctagggcggtttctgtttgaataaaaacatctaaaagtcccggctccgtggtcgtgtttgtgtctgtggtggttgtgtcctgacgtcgcacgcggatcatctgaagcaccggctctccagtggggagctgcggttgcgtgtacccctcggtcaccatttcgcattgttgcgtgaaaatctgaaacaacgtctgtaccaattcggacaccgaggcgtatgtctcggcgtactggggtttcagttctagccacagacactgcagcatgtcttgtggaaagaccagcgtggccatggcgtagagccatagcttgcctaagggcggtgtgcttttttgcgggcctacctggcacagttgctgtaccagtttattttcccaaaacagtttattgagctgcatggcgggccattgggtgggggtgatacagaaggccttgacctgttcggggaggtggtcggggggcattttgtgtgtgttattgactaccgcgtgtatcacatcctgatgtaggtgagctgtgagggagggtagtgacatttgcaccgggtacttgaggacggtgtagatgtactctgggtacagagctgctatgagtacacaaaactcttgcagacttaggcgcagcacggtaccgcggcccggtctctgttcccctacgtcaccaccctcgccgcttcctacgcgatcggcggccgtcagctcctgctgcgtgtcgatgcgctggtgccaggcggtgctcaccagataacaaaagagcttaaggttatgcaacgtgtgagtctccgcggggtgtgtgtggctctgatgctgcgtgaggtagggtcgtaggtcgtactgcgagatctgcggccagaaagtgcgcaatgtctgacagacggccacggctaccgtgatggctttataacgtgtggtgacgacgttcttgagtcctccgccgctacagcggcgccgccatgccaggggtcggccatcgtctcgcagcgccaagtacttaaaggctacgttgccgtaatcggtgaccaggtgaatgggctcgccggcctgcgtgacgatttgccgcatgccgaagacgtctaccacttcaaggaaggtgtcgtggtgacgcgcgaagcatagacgacgcaggcggtcgcgcatgatcagcgcggggtcggtctcgtgtgttggcggaagcacgctaggaatgtcttccagcctatagactagcgatgagccgttgagcttgttgagcagatactggtgacccagctggacgtgtcgttccagtgcgttcaacccgcgtgtaaaggcgcccagcgaagtcgtcgcctgcggtttccgtgggttgggcagggctccctcgttggagagacgtgtaccgcgttgcttggccagttccgcaaaacgagtccgcaggtcgcggatcttttccaactgcgaccgaaagtccagcccgtagctgaaggtctggatgccgtgtaacagcgcaaagtattccgtcgccaacgtttcctgcagttctaggtcgcctagcgtctgacccaagcgctgcaacagttcctgcactttttgatgacgcgcggcgccgccggctacgcgtccgggttccagtcgctgccagaccgcttccaccgcctggaccatgtcgacccgcggcgtggacgcgccgttggcagttgcctcttgatgctgtgcaataaaattttcacaggccgcgttttgttcgatttgatgcgctagcgtcacggcgctctcgacagcttgctgttgcaggttccggtagtgggtcctgcttccgtgatgcgggtgcgtagggtccgtggtgatttgcgcaagggcttcctccagaaaggccagcatccagcgcaccgtgcgctccgccgacaggtacggcagttgttgcgtggctttgcccaacagctcgcgaagtgtctccagcggcttttccatcagcgccttggcgtcgggggtggtcacgtccagtccgccgctcattttgtggcgcgtgaccagatcagtccacaggttctgcgccgtgctcagctgctcgtcgcgttgtcgcaactgcgtctgtactttctgattcagcagatcggcctcgtcgctgagcgctttccgggccgcgtcggcctgctgatctagcagcgttttgaagacgggccgctggaagtcggcgggcgggggcgtgattcgacccgccagctcctgacccttgaagggtttctcgggtacacgcgtgacggagctgctcccgggatcctggcgcagcgagcgatccagccgctcgctagtctcggtcatctgttgtctagtctcttgtaactgtccctccatcttctgttgactgctgcggtagcgtacaaagtcgccctcgaactcgctgcccgtgatggctgtagttggatcgccctgttgacacttctcgatgaactgcgcttgatggacggcgtgttgcagggcttgctgcgtctcatggatcaggagttgcggacccaaaatttggtccaagtggtttagcgaggcttgggtttgcatagccgcttctcggtgcgggtgacagcgccgctccacatcacccgtcagcacgccgtgcagacactcgttgattcgcccgtctagttttttgctcagctgctgcagcgccgacagcaagtcctggttgaacttgtccagtagcggttgggcgcgttgatctaggcccaagagcagctcgagtgtggcctccagtggttggtgcgggatagtggagagcatctcgcccttaacggcgtccaccacgcgttgcaaatcctgctgcacctttttttggtagccgtccagtagctgccgttgctgttcttcctgtttacgtttctccttgtctaaaaagtcttgcatcttggtggttaacgtttgttgcatttgatgcatgacacgatggctcggtgcccgggccaagacacgctgtacgtcctccacagaagttaccgtgagcttgccggcctcttcttgccattcacgttctagccgttccaggtgctgttcttccatctcgtgttgataccgctcatagagttccgtcacctgaggtccgacgcccagtcgtccgaccatatgttgaaagaaatattcatggttacggaaaaagtaaaccaactctcgtaacgcttggaagcgtttttcggatgcgccggtaccggctttctcgatctgctccagtttcttgaccatctgcgcgtacgtggcgttggcggcacgcagatcctcacgttcatgcgagtcgggtggcagttgctgcaacaacagactgacggcgtcaaaaaacgtcggtcgcggcgactcgtcgcgcgccagtcgcatcactaatgtgtggaacatgctcagtacggcgttgatgagtcgcagacgcgtctgttcgtcgcgacgtaacatctcgcgtaattgtgggtgtcgcttgatggtctgttcggtgggcggatcgtcgtacgaaagtccgtcgaggaaacgctgcgtttcctcttcctcttcgtagaggcggcttagcgcgagttgcgcgttctgtaggcgctgctgcacttcgggtagctgcaggccgcctagtgcttccagctgcgctagctgctcctgtaccaaggccagtgtgagcgccgagccgcggctgcccggatcgcgcaccagcgtctcgatgacatgaagcaggtcgtggatctgcgtgaggcgaccctcgttttgctgcgtggcttgctggtacgcgtgtcgcagctgcaggatctcttgcagtagcggtacgttgtcgcgcacggtgcccgtcatgaggtagctcagttgttcgcgtatgacgacgaagccctcttcgtagctgccgtcacacagtttcaggtcgcgcaggtcgtaaaagagtctcagtacctgctcgacgacgcgttccatctgcttcaggtcctctaccggcaaaaagccgttgagaatgtgattgtgcacgcgcgtcagcagctgcgtgctcagacggtccaggtccatctgcaactctagcattttggcgttgcccaggcgaaagagttcctgcttggcgttgtcgtccaacggctgcagcgctttcagaatttcgcgtcggttcaggtcgctggcgtccaggtcgtgaatgtcgatgctggtgatgagaccggccaagtgctcgtaaacgccgtggtactcttcgcgttgacgttgcaacacccgacgtcgctgttcgatgacctgcgtcagacgctgaaagtctacgggtcgcaggcagatgaagctgtcgctaacaggcatcggtcgcttggttacgaaacgttgcagtcgttgagatagttcgttagtgggtttgctctccacgtagcgcagcatctcctccacccaggcgatgagcgccgggccatgctggcgtccgtagggatcgaagacgacttgcatcttctccagcagcgcgcgatccagcatcgagtacgtgtctttggtggtcttgtggctcaggtagtcgtgcatgcgccgcagatccaggccgtggtgcagccagttgagcagaaaggcatccagtttcttggataggcccagataggcgcgtaccgcctgttgcgccgccgattgcgggccgcaggggcgacgcagacacgagcgttgattgacggcatggatgatgagctgctggagacgatcggtgaggaaagcttcgtcgaaggacggcgccgtggccgttgccgcgttagcgccgttttcggtacccgccgcgtgcaacgtccaggcgctggtgttggcaggcaacggcggcagcgtcagagccttcaactcctgctctacctcgtcgaccagctgttggtagcggcccagggccggcagggccccttcgccgcagctgtaggacggtggtaccgtggacgaagaagaggccgccgctatcgctgagggggaggaggaggaggcggtggccagtgttttggacgtcgtggacgggggtttctttttgcctccgtgtttgctaccgctgaggtccttgcggcgtttctcgggtgtttttttgggtgaggacgagggatcgtagacgggaatgctgggcgccacgccaggagggcagcccgggtcgacgatggggtcgggcagcggaggtaaggaaggtgcggcggtggtcgttgtcgccgccgtgtccacgctttctcggacgacgccggtgaggtcgatatcgcggtcgcgataggtggagaccaaacgcgcggcgatctcagcctctggtacggtcgccacatccagcatgtagagaaaaagggcctcatagtagaaagcgggcgatagctgcacgccgaagcccgtgagcaccatcagcacctgatggagaccctcgcagtgatacacggcggcattgtgacattccgcggagctgtgcggatcaaagaccaacatgtggtcctcggtgaagaccacggcgcgcgccgacgagttgacggtgacgagtacgtaggtgggacgcggtttggcgtgcgcgtaccgcagaaagtcgaagatgcccggacacatgtagccgtccaggtcgcacgtctcggtggtgccgttgaagggccgcgagagcgcgtgcacggtccggccaaaccgcgactccaggcggcgcggcacttcgtcgcccagtcggtagaccggcagccgcccgccggcgggcagcttcttttgcaactcgcgctctagccgcgcgtccagacgcgcgccctcttccatgatggcgtccagcgcctcggtctgcaggacggcgctcgttccacccaggtgcaaggcgtgtaggaacatgatgccgttgcagacgcattgattgcccgctcgcgctccaaagcgggcgatgtcgccctggtggcagctggcctgcgtgactttcatggcgaggccggcggcagggacaccgatgtcgagccggcgggcgggtcgatcgaagacaagatgtcctgctgcgcctggcttacggggacgatgtaccagtttaataggtcgctcgcggccaggtgtgtgggttcgtagcgcgcacccaggacctccggtacggacgtcgcgcccgccgtcgattcttcgtgatcggtgtcgggcgtcatgcggagtcgcggcggttggggcgccgattcccagggcgcctccaagaactcgcgtaaggcgcgatccgcctcggccgccgccgcaacgcccgtgcccgcgggccaggtcatcggcgctagcgcgcgatgtcggtgcagcaggctcgtcgcctccgtcagacagagctgtgcgccgcggcgttccaagttctcgcgacttagtacgtcaaagacggctagcgcgcgctgcaccgcggtaacgacggcgccattggaacgttgcgcctgctcgagcgccaaggtcacgcgcgtttccaacactttgattttggaggccgtctttttgagcgccttgctcatctgggccaccgtgcggtgacccttggcgtgtcggcttacttcctctgtgtcgctgctgatctgacgtacgcgcacgcgaacactcagcaggcgctcgttcaagccgcgcagattctcggccaacagccgatcgcggcgaaccagctcgcgcaactgttctacgaaacgcgtggttggtacgcgcagtccgtactgaccctgtacctccacgtacaccgtcacgccgtcctccgagaggcgcgcccggccgcgcgccagaccgaaacaaagtcgcgtgtgtcgcagatagtttctcagactgccggcgctgctgcgcatcacgtcctcgatcagcgggttgacggtggtgtacaggttatgcgctacggagcgcgccatgagctcggccagcaggtccacattgggcgtgacgggtacaccgctgaggtgctcgagggtcgtggcgatgtcgaagacgcaatcgcgtaccgtcttaaaaaccgcggcgtcgatgtgcttgacaaaggtggtcaggttgtagatggagaccaggttctggtacagcgtcacctgctcgggcaacaatacacgacacagctgaatgagcgcgaaaagacgcggcgaacccacggcttgaaacaggccctgcgggataccaaagatctccgaaaattcagttaccaccaccaactgcgcgaagatgctggggaactcgggatgatggctgaaggctagcagggaggcgtagttgacgcggccttcgttcagattaacgagcgcgcattcgcgtaagatgtcggagcgtgtgacgccgtcaagcggaggcaaaggcgaggccgcgccggccgcgccgcgagacggacgcaaggtaaacaggtgcacgccccacttgctgtgcaggtcccgatacaggtactcgcgctccgcctccgtggcacccttcgtatgtgcctcaaagtcttcttccgtgtactgaaccgcaaagtgcgtattgacgttcagtgtcacgttgctccagacgtgctgtagttcctccttggagccgatcaacgtggatcgatgctgctccaaaatcaaccgccgccggtggtcgaacaggaacgtggggctgtacacatagaggcacatgaaaaacgtgtaaaaattgtagatgatctgtatgagtttctcgcgaatctcgctgacaaagagcgagctcttctgactggccggctggatcagcgccatttgtgcgtaggccgcgcaggtatcgtgattgaaacccagttccaccagtcgcgttaccatctgtgtcagatccagtagccgctgcacgcgtcgcggcgtatgcaagtggtcttccagcacgcgatcgcacacgcgcgcgtaagcgtctaggttggcgcgcggcgaaacttcctcactcaatagacgcgagatcagacccgggtggaaaaacatacgttcgggcgacaggtaaaggttcacggtggagatgcgcgtgctaatgatgggaaacatgaggccgctggcgtcacgcgcctgcagattacccacgaacagtttgtagctgacgtcacgcatgtgttcggcaccgggcttctggtcgccgtcgatatcggaactgacgaaagagctcatgtgccgcacgctgttcttgacgtagttttgaaactccacggccaaatcgccgttaaccgaacggtagtgtgtgtaaaaaaaatgcatcagaagcaccgtgtccagttcggtgtcggtgtcgcgccgaaacaacacgtagggcatgagcgtgcaggcccagtagatgagccgctggtaggtcaggtccaggagttcggccacggcgcgacaattgacgtagggccgcgcctccgtgacagccgtttccagctgcgtgatcacccggcggaccagcggctgctggcccccggaactcgaaccgcccttcttgccgcggcgctcagccgacgcgttgttactggcgatcaagtccgccgccgccgcggcgccgccgctctgttcggctattacggtctggatctcgcgcagggtctgcaacagcttctggaaagccgtcagcgtggccccgttgtggtagaacggcaaccggtcctcgtccccgccgccgtcgtgctggtgtcgtaggaagcggtccagctgttcgtgcaactgctcggcggcgtacagtgggtcgcgcgccgtctgtaccgtggcgtggcttaggaggtaaaagaccacgttctgacgcacgaagccaaagtggtagcccgagctcggcaacgcacccacgaaggcgcgcacggcgctcgcggtcacgtcctgggcatccaccgcgccgatctccaattggctcacggtatttaacgcctccgctttgtccgtggcccgtgcccgcagctgctctatcaactttttgaaatctaccgtgcgcctcgccatcatggacgcgcgcgcggtggccaaacggccgcgcgacccggccgacgaggacaatgaactagtgacggcgctcaaagccaaacgcgaggtaaatactatatcggtgcgctacctctaccacgccgatcaccaggcgctcacggcgcgtttcttcgtgcccgagggcctggtagagttcgaggcgcagccgggcgcgctgctcatccgcatggagacgggttgcgactcgccgcgacacctctacatcagcctctacctgttaggcattcgcgcctccaacgtctcggccagcacgcgctgcctgctcgaaagcgtgtacacggcctcggccgcgcgcgccgcgctgcagtggctggacctgggcccgcatctgctgcaccgccgcctcgagacgctgggctgcgtcaagaccgtctcgctgggcatcacctcgttgctcacctgcgtcatgcgcggctacctttacaacacgctcaaaacggaggtgttcgcgttgatgataccgaaagacatgtacctgacgtgggaagagacccggggacggctgcaatacgtgtatttaatcatcgtctatgactatgacgggcccgaaacacgtcccggcatctacgtgctcacctccagcatcgcacactggcagaccctggtcgacgttgcacgcggaaagttcgcccgcgagcgctgtagctttgtcaaccgtcgcatcacgcgcccgcgccagatccctctgtgtaccggggtcatacaaaagctgggctggtgcctggctgacgacattcacacctcgttcctggtacacaaagaactcaaactgtccgtcgtccgtttggacaactttagcgtcgaattgggagactttcgagaattcgtctgagcggcgctgacagcatacggggaggagacacagaagaaaaaaataaacacatcgcacacagactttataaaccgtagttatcggcgccatctagactcactttattgaaatctacctgatttctttgttattttcctcgtaaacttatgaatccggctgacgcggacgaggaacagcgggtgtcctcggtgcccgcacatcggtgccggccaggtaggattccaagccgcggctcggaaaccgagacggaggaatcgtcggcagaggccgccgctgatactaccgggggagatgacagcgagctcgaggaggggccgctgcccgggggtgacaaggaagcgtccgctggaaataccaacgtatcgagcggcgtagcgtgtgtagcgggctttacgagtggtggcggcgtcgtcagttggcgtcccgagtcgccgtctcccgacggcacgccgtctgtgctgtcgttgacgcgtgacagcggtcccgccgtgcccagtcgcggtggacgcgtgagtagcggtctgagcaccttcaatccggccggcgcgaccagaatggagctggacagtgttgaggaggaggacgatttcggagcttcgctctgcaaagtgtcgccgccgatacaggctacgcgcatgttgatgggcaaaaagtgtcattgtcacggctattggggcaagtttcgcttttgcggcgtacaggagccggcgcgggagctgccgtccgacaggaacgcgctgtggcgcgagatggacaccgtgtcgcggcacagtgccggtttgggcagtttcaggctgtttcagctcatcatgcgccacggtccctgtctgattcgtcactcgccgcgttgcgatctgctgttgggtcgcttttatttcaaagccaactgggcgcgtgaaagccgcacgccactgtgttacgcttcggagctgtgcgatgagtcggtgcgtcgttttgtgctgcgtcacatggaggatctacccaagctggccgaggagacggcgcgttttgtggaattggctggttgctggggtttgtacgcggccattttgtgtttggataaggtgtgccgccaactgcacggacaggacgagagcccgggcggcgtgtttttgcgcatcgccgtggcgttgacggccgctatcgagaacagtaggcactcgcgtatctatcgtttccatttggatgcgcgtttcgagggcgaggtgttggaatcggtgttgaagcgctgtcgcgatgggcagctgtcgctgtccaccttcaccatgtctaccgtgggttttgatcgcgtgccgcagtatgactttctgatctcggccgaccctttttcgcgtgacgccagttgggcggccatgtgcaaatggatgagcaccttgagttgcggtgtttctgtgtcggtgaacgtaacgcgacttaacgccgatgtgaacagcgtgattcgttgcctggggggatactgcgatttgatacgcgagaaggaggtgcatcgacccgtggtacgtgtgtttgtggacatgtgggacgtggccgctatccgcgtgattaactttattctcaaagaaagcacgtcggagttgacgggggtttgctacgctttcaacgtgcctagcgtgttaatgaagcgctaccgtgcgcgtgagcagcgctactcgctgttcgggcggcctgtctcccggcggctctcggacctgggtcaggagtcggctttcgagaaagaatattcgcgctgcgagcaatcgtgccccaaggtggtggtgaacacggacgattttctgaaaaagatgttgctgtgcgcgctcaagggccgtgcctcggtggtctttgtccatcacgtagtcaagtactcgattatggccgacagcgtgtgcctgccgccgtgcttgagtcccgatatggcgtcgtgccactttggcgagtgtgacatgccggtgcagcggctgacggtgaacgtggctcgctgcgtgtttgcgcgtagcgacgagcagaagctgcatctacccgacgtggttttggggaacacgcgacgttactttgatttgagcgtgctgcgcgagttggtgaccgaggcggtggtttggggcaacgcgcgcctggacgcgctaatgtcagcgtcggaatggtgggtagagagcgcgctggaaaaactgcgtccgctgcacatcggcgtggccggcttgcacacggcgctcatgcggttagggttcacgtactttgcctcttgggacttgatcgagcgcatctttgagcacatgtactttgccgcggtgcgcgctagcgtcgatttgtgcaagtcgggtttgccgcgctgcgagtggttcgaacgcaccatctatcaagagggcaaattcattttcgaattgtatcggttgccgcggctctctatcgccagcgcgcgctgggaagcgctgcgcgccgacatgctcgagttcggattgcgcaactgtcagtttctggcggtgggtcccgacgacgaggtggcgcatctgtggggcgtgacgccgtcagtgtgggcttcgcgcggcaccgtgttcgaggaggagacggtgtggtcattgtgcccgcccaaccgtgagtgttacttccccaccgtggtgcggaggccgctgcgcgtgcccgtggtgaattacgcgtggttggagcagcaccaggaggagggcaaggcgacgcagtgtctgttccaggcggcgccggcgatccaaaacgacgtggaaatggcggctgtgaacctgagcgtgtttgtggaccagtgcgtggccctggttttctactatgactcggggatgacgcccgacgtgcttctggccaggatgctcaagtggtaccactggcgctttaaggtcggagtatataagtactgtgcctcttagtcgggggcccgctggctcggcgcggctgtattattagacgccgggcgtcttcgcagcgttcccggtcgtcgtgtgtgctctctataaaactttcgctcgctcgcgcccgctccttagtcgagacttgcacgctgtccgggatggatcgcaagacgcgcctctcggagccgccgacgctggcgctgcggctgaagccgtacaagacggctatccagcagctgcgatctgtgatccgtgcgctcaaggagaacaccacggttaccttcttgcccacgccgtcgcttatcttgcaaacggtacgcagtcactgcgtgtcaaaaatcacttttaacagctcatgcctctacatcactgacaagtcgtttcagcccaagaccattaacaattccacgccgctgctcggtaatttcatgtacctgacttccagcaaggacctgaccaagttctacgtgcaggacatctcggacctttcggccaagatctccatgtgcgcgcccgatttcaatatggagttcagctcggcctgcgtgcacggccaagacattgtgcgcgaaagcgagaattcggccgtgcacgtggatctagatttcggcgtggtggccgacctgcttaagtggatcgggccgcatacccgcgtcaagcgtaacgttaaaaaagcgccctgccctacgggcaccgtgcagattctggtgcacgccggtccaccggccatcaagtttatcctgaccaacggcagcgagctggaattcacggccaataaccgcgtcagtttccacggcgtaaaaaacatgcgtatcaacgtgcagctgaagaacttctatcagacgctgctcaattgcgccgtcaccaaactgccgtgcacgttgcgtatagttacggagcacgacacgctgttgtacgtggccagtcgcaacggtctgttcgccgtggagaattttctcaccgaggaacctttccagcgtggcgatcccttcgataaaaattacgtcgggaacagcggcaagtcgcgtggcggcggcggtggtggcggcagcctctcttcgctggccaatgccggcggtctgcacgacgacggcccgggtctggataatgatctcatgaacgagcccatgggtctcggcggtctgggaggaggtggcggcggtggcggcaagaagcacgaccgcggtggtggcggtggttccggtacgcggaaaatgagcagcggtggcggcggcggtgatcacgaccacggtctttcctccaaggaaaaatacgagcagcacaagatcaccagctacctgacgtccaaaggtggatcgggcggcggcggaggaggaggaggcggcggtttggatcgcaactccggcaattacttcaacgacgcgaaagaggagagcgacagcgaggattctgtaacgttcgagttcgtccctaacaccaagaagcaaaagtgcgggtagagcgtgggccgcgtgcctgggaacgcgcgcacggcgcggtcccgtgatggagaaaacgccggcggagacgacggcggtttcagctggcaacgtgccacgtgactcaattccgtgtataactaacgtgtccgcggacacccgcggccgtacccgtcccagcagaccagccaccgtccctcagcgacgtcccgcgcggatcggacactttaggcggcgcagcgccagccttagctttcttgactggccggacgacagcgtcacagagggcgttcggacgacctccgcgtcggtcgccgcctccgcggcccgtttcgacgaaatccggcggcgccgccagagcatcaacgacgagatgaaggaacgtacgctggaggacgcgctggctgtcgagctggtcaacgagaccttccgctgctctgtcaccgccgacgcccgcaaggacctgcagaagctggttcgtcgcgtcagcggcacggtgctgcgtctcagctggccgaacggttggtttttcacctactgcgacctgttacgcgtcggctactttggacatctcaatattaaaggtttggagaagaccttcctgtgctgcgacaagttcctgctgccggtgggcactgtgagtcgttgcgaagccatcggccgcccaccgctacccgtactcatcggcgagggcggccgcgtctacgtctactcgcccgtggtggaatcgctgtacctggtgtcgcggtccggtttccgcggcttcgtgcaggagggcctgcgcaactacgcgccgctgcgcgaagaactgggctatgttcgcttcgagaccggcggcgacgtgggtcgcgagttcatgttggcgcgcgacctgctggccctgtggcgcctgtgcatgaagcgcgagggttccatcttcagctggcgagacggtaatgaggcgctgacgacggtcgtcttgaacgggagccagacttacgaggatccggcccacggcaactggttaaaagagacgtgctcgctgaacgtgctgcaggtatttgtggtgcgggccgtgccggtggagtcgcagcagcgcctggacatctccatactggtgaacgagagcggcgccgtcttcggcgtgcatcccgagacgcggcaggcgcactttctggcgcgcggactcctgggcttctttcgcgtcgggttcttgcggttctgcaacaactactgcttcgcccgcgactgttttacccaccctgaaagcgtggcacccgcttaccgcgccaccggctgtcccagagaactgttttgccgtcgtttgcgcaaaaagaaggggctctttgctcgaaggtgagccgcggacgccgtcggtaccgtctccaccacagttaccaccgtcgccgtcactgccaccgacatggagcccacgccgatgctccgcgaccgggatcacgacgacgcgccccccacctacgagcaggccatgggtctgtgcccgacgacggtttccacgccaccgccgccaccacccgactgcagcccaccgccctatcgacccccgtactgcctggttagttcgccgtcgccgcgacacacgttcgacatggatatgatggaaatgcccgccaccatgcatcccaccacgggggcgtactttgacaacggctggaaatggacttttgctctcttagtggttgctatattagggatcattttcttggccgtggtgttcaccgtggtgattaaccgggacaattccactacaacgggtacatcatcggggtaacgggaaatagagcatgtgcttgactgtaccatcattgctgctacggaataataactacgctacgacctggcctgtggtgtgtgttgttttttgtgcacgcacgacatgacactcttttgccgcaccgccaacagcaccgccggctacgtcgacatgaacgtctgcatcggcatgatcggcgtggtttgtttcgttttcggggtctttattctcattttttgctccacgttgaaagctttctacgtgcggcaaaagacttaccacctcctgggtaccgagtcggacgacgaggagaccacggtttgggaaaagcgccggatggagtcggatacagacttttaaaagaagccataaaaatatgggaattcccctgcctacgtcttcatgacgggcgcctttttcttcgcctcgggctctgtctcgtcgtcattcgggccaggactttttaatggccaacagcctgtggcaccgcctccgaacgctcgtgagcaacagtcggcagaatgaacaaattcagcaacactcgtatcggcttcacttgcgcggttatggctccgcggactttagttctgacgcttggactcctgtgtatgaggatcaggagtttattgtcttctcctgccgagacgacggtaacaaccgccggcgcgatgtccgctcacggtccgcaatgtccgctcgtgttccagggttgggcgtacgccgtgtaccaccaaggcgacatggccctcatgacgctcgacgtgtactgctgccgccagacctccagcaacaccgtcgtcgcgttctcgcatcatcctgccgataacacgttgctgatcgaagtgggtaacaacacgcgccgccacgtagacggaatctcctgtcaggatcattttcgcgcgcaacaccaggaatgcccggcccagacggtgcacgtgcgcggcgtaaacgaaagcgcttttgggctcacccacctgcagtcctgttgcctgaacgagcattcacaactctcggagcgggtggcctatcatctgaagctgcggcccgccacgttcggtctggagacctgggccatgtacactgtgggcattctggccctgggctcgttctcctccttctattcccagatcgctaggagcctgggggttttacccaacgatcatcactacgccttgaaaaaggcttgataatgataattgcacatcctcacgagtgcccttacctatcatcacactaagaataaagaaaatcgatcggtgtcgtgacgtgtggtgtgtgtttttcactgttatcgggtaccagggaggaggggttaagaggtcacaggtgcgatttaccgtaaggagagtcacacttaagaaaaaggtggaaattcctcacccgtcctattcccgtcagccgtcagtgacgtgaatcgcccctcacgtcagtgttgtcccctatccgcgtgagttgggtggctcaccgtcaggtgctccgagacgcgtgtactcggaaactgcgtcaatgcggtcggtcagccgaccctttgatgtagtacatcgcgtgcgaagatgaaaaacatcttaagaaaccgggtcgcctaaggggaaaaccccacgtgtcttgggcgcgtcatgtccggcatcttcatgtatataagacggtgtttcaagacgacgtgagacccacacgcgggtttcacttctttctttaattatgtctccagtctacgtgaatctgttaggtagcgtgggcctgctggccttttggtactttagctaccgctggatccagcgaaaacgccttgaagatcctctcccgccttggttaagaaggaaaaaagcatgtgcgctcacccggcgttctcggcaccggttacgccgccaacatggcgtaattgacggtgagaactcggagaccgagcggtccgtggacttggtggccgcgctcttggccgaggccggggaggagagcgtaacggaggacacagagcgggaggacacggaggaggaaagggaggatgaagaagaagaaaacgaggctcggacgcccgaggtgaaccccatcgacgccgagggcctctcaggacttgcgcgagaagcctgcgaggccctcaaaaaggccctgcggaggcaccggttcctgtggcaacggcggcgacgagctcagctgctgcagcacaacggcccccagcagtctcaccagtaagcaggggtaaacaaaaaaaaccacagactccgggatagtataagaagggactttaccgctattgctgctattcatagagaaggatagaaaggatgactacggccacgcatagcaccgccgctatcatgagcctgctggacgaggccgagtggcgacagacgcagatggacgtggggggactgatccaggcgtcggcgttgggcaaggtggcgcttcgctacgcggtgaggaaactgatgaagcgcggagccaggctgcggcacgactcgggtctctacgtgtgcatctgcgacccctcttacgagtttctgcagatgaacctgagtaagatcagttggctggagcgacactgccccccgttggaccaggagctcatcatgttcggggtcatcgaggcctgggaggaagcttcgatgcggcccacgcgtcagctggtgttgttcatgacgcccaagtgggacgtgttcggctacgactccggtatcctgtttttcctggcgcccagcatggcgcagttctggcacggtgccatcgtgctggagtattggaacgctttgttcccggtggaggtgcgctcccacgtccgtcagcacgcgcacactatggacgacctggtgatggtcttccaccagctggactacgaaaagcaggtgctggaagcgcgtcgcgacaagaatacggaggggccgcgcacttttgccaagtcggtgaacagctacgtgcgcgccatcctggaatctgagcggcggatccgcgaagggaaaattcctatgaccttcgtggatcgcgactcgctgcgagccaattcgttggcccacatccaggccaccggggctcagccttctcacgccccggcgcaacgggtgctgtccgcgccgccgagcctgccgtcgcccgtgtcggaagaagaccccgctgccgccgccacccctccgtcctccgccgccaccacccccccgtcctctgtcgtcccggcctccgtcgagagcgagttgtcctcgtcgccgccgttgccgccggtcgtggtgaaggatgtgatgtacacggccggggagggcgacgtggtacagatggtggtcgtggtctagaaggagaactttgctgctagatgaccatgttcagctttttttttttgtagtattttttcatagttgctatacctcagttatcccccctattagccccacatgctgcttaataaacatacttgtttcattttctttctagtgccgcggttttttgtcgcgtccacgggctgcgcgggtttcaggtaaaaacaacgtgtgtgataaacgtgggtttttacctatgggaaaggggagggtgtaaacatgagtctccgtcaataaaaagtcccgtgtcgtccccacgtaggtgtctgtgtggctgttgttgacgctgttttggagcacgggatacggtgtttctgttcgatgtacgtaccacggtacggacattaacgtcacttccaacgccacgagtatgaactgcctgttaaactgcacgtgcaatcatacgcaaatctacaacggcccctgcgccggagccgaatccaaactgcccttgaacgtaacgtttcggcaatcacgtcggcagtggcacagcgtcatgctcacgtttggttttcagtaccacctggaaggctggtttcccctgcgcatcctgaacgagagccgcgatatcaacgtcaccgaggtctacggggaggttgcgtgttttacaaatgacactaatattaccatgggacagctgacgcttaaccttaccggccgcagttacgtattgcgagcactggcgcgcacgagtccgtttgagtcatccgtaaattgggaggaaaccaacgtcaccgacaacgtgacttcttcagaaaacaacaccgtcactgtgatgtcaatcttaacggtatatgcggaaagtgattatatttttctacaagacatgtgtccgcgatttctcaagaggagcgttaagcttacaaaaaacaataaaaaaaacacaacgtttacgggaactaacatgacatcgcttcccatgtggacatcggaatgcgaaggatggaggtattggactacgttatccatcatgtggaaaaaccgccgttcggctctgctccgagccaaaagtcgcgcgttgggacactgggcgttgttgagcatatgtactgtggcggcgggcagcatcgcgttgctcagcctcttttgcatcctcctcatcggacttcgtcgcgatttgcttgaagatttccgctacatttgtcgggacgagggaagttccagcacaaaaaacgacgttcatcggatcgtctgacgtcaacgctgatagtgtctataaaggccgtgccgccgcgccgtagttctccgaaggcggacggaggagtctgtcgaccgcagcggtggctggagaagcgcagcgtcggcgagcgaaggtagaggagtccgtcatggacgacctacgggacacgctgatggcctacggctgcatcgccatccgagccggggactttaacggtctcaacgactttctggagcaagaatgcggcacccggctgcacgtggcctggcccgaacgctgcttcatccagctccgttcgcgcagcgccctggggcccttcgtgggcaagatgggcaccgtctgttcgcaaggtaagccccacgtcgttgaagacacctggaaagaggacgttcgctcgggcacgttctttccaggtgttttcaacgtgcgtggatttttttctattatttctctaccaggtgcttacgtctgctgtcaggagtacctgcaccccttcggcttcgtcgagggtccgggctttatgcgctaccaactcatcgtgctcatcgggcagcgcggcggcgtttactgctacgatgacctgcgcgactgcgtctacgagctggcgcccaccatgaaggactttctgcggcatggctttcgtcactgcgaccacttccacactatgcgcgactaccagcggcccatggtgcagtacgacgactactggaacgccgtcatgctctatcgcggtgacgtggagagcctgtcggccgaggtgaccaagcggggctacgcttcctacaccatcgacgaccctttcgatgagtgtcccgacacccatttcgccttctggacccacaacacagaggttatgaagttcaaggaaacatccttcagcgtcatccgcgcaggcgggagcatccagaccatggagctcatgatccgtaccgtgccgcgcatcacctgttaccaccagttgttgggcgcgctgggccacgaggtgccagaacgcaaagagttcctcgtacgccagtatgtcttggtggacactttcggcgtcgtctacggctacgaccccgccatggacgccgtctaccgtttggccgaggacgtggttatgttcacctgcgtcatgggaaagaagggacaccgaaaccaccgtttcagcggccggcgtgaggccatcgtgcgtctggaaaagacacccacctgtcaacatcccaaaaaaacccctgaccccatgatcatgtttgacgaggatgacgacgacgagctgtcgctgcctcgaaacgtgatgacgcacgaggaggctgagagtcgcctgtacgacgccatcaccgagaacctgatgcactgcgtcaaactggtgacgacggactcgcccctggccacgcacctgtggccgcaggagcttcaggccctgtgtgacagcccagcactgtcgctgtgcaccgatgacgtggagggtgttcgccagaagctgcgagctcggacgggctcgttgcaccactttgaactctcctaccgctttcacgacgaggaccccgagacctacatgggcttcctctgggatatcccgtcctgcgaccgctgcgtgcgccgacggcgtttcaaggtgtgcgacgtcggtcgacggcatattattcccggcgccgccaacggcatgccgcccctcaccccgccacacgcctacatgaacaactgattaaggaggggatgacgagcacggtggtcccgtttgtctatgtgcatgtttttgtatataatacagcattttatataacctttccctgtcttttttactcgtaaactgtgtactccgctggtcaataaagaaaaccacactgttagaaaaccacgtcgacggtatttttattgatatcgacgtctcgtcctgagacagacacgtagaaaaagaggaaaaccgcgttcagagatgccgtagattttcggccagatcgtcccgcgggtcttcgacgtcgctgccgtagctagtgctcggcatgctgtcgggtccctggaagcgtgtgtgggccggccctcggggtgcgggtggcgggctgcgtcgtcttcggtgacgtcggtggtggctgtaggctaccgagtagggcgaaaagagggtcacgctgaccatgcggcgtcgttgccggggcggctgctccaggtccgcggagctaatgccgtgcgatcccgacaaggaagaagaggagagcaagagacccgtggtagaagaagtcccggccgaggtgtacgtggacgcgggcgtggtggttcgtgtggatgacgacctggcagacggcagcgaaacagaattcggagatgctgaggacgacgacgaagacgcggacgacgaagaagccgcgtcggtcacaggacggcgaaaaacatcggcaaataaatcgcgatgttctgtgatctcgggttccgactcctggcccagaggcgctctgtcgaggagttccatgaagcgcttgggtgtcaggcccgtctgccgagaggcgccctcgatcatcatgctatagatgcgctggaggtgatacgtctcggtggtgatcttgccttcgtggaagttatagaagatctgcagggtttcgggccgttccacgaacatacgtcggcgcaggtagcggctgggctgttctggcacgcggaaaacctcaccgttgccgtacaggttcttggagaagaaaaagagctcgccctcgcgcgccgtgggatcggcttcgagatcgagctgggcctcgcgcggctcgccgtcgttctcctgctcttcgtcctcgtccccgaactcgccgcgctcgcgggcgtccgagaccgattggatctttttcagcagcttgtacgcgctgaaatgtaaatatcccgggcagaggtacacgttggcctcgtgcagttgcgtcagtagctgcaacagattgtacagcatcggctggaaggccggactgctgtgttgccgcgcaagttccagcccacgcaccagcgtgacgaaagtctgccgcgtctcgggggcttgcgtgtaacaaaagtaaagcgcgtcgcaaagccggttgcagcgttccaccacccagtcctgcatcatttgtagctccagcgcgtgtcgcagctgcaagtgtcgcagcgtcaacaacagatacatgtcgtttagcgcgtcctccagggtgcgtgagcccgggcgtttgatggaggtgaggcagcgcaacggtcggttacgacgttgtgttacgtcggacaggttctcggcgcacagatccaccgcctcgaccgtggtgaagggcggtgggtggaacagcaggttgtaggtggtgaggcgcggatagcgcgcctcggcctcgggagacgcgcgcagccccagcgcgtcgcgtacccggtgcagtcggaccagcgctcgttttagcacgccgaatgtcacatcgtcggcgcccaggtgcacgctgatgtcctcgggcttgacgccggtttgcgcagcgcggcagagccggatgagccctctaagcagccgcgtcttaagcggctccgagtacagcacgtcgagctgcgtgcgcaggtcccgcaacacgtcgcggctgttgcggtagtggttagcgaggatgcagatacggataatctcctgggccacgggctttaccttcataaaagcgttgcgcacctggaagtcaaccagggcctccagcgcgtatacggggctgggcacgccaaagttgagcagccccacaaagttggagcagccctgggtcaacatttcgagcagcaggcgccggtgctcgtccccaaacaggtcaacccgaaagttgagccagtcgtccacggggagaacgggcagtggcgggcccgatggggctcgcgatccttgggccatgatggggctccctttgaaaacgaaaccaaaaccagagcggaacttgagaaatcaacgctttattgttctccagtgacgttaaatacacaacggggttatgggggacgtgacgggggtaagggctggggtgactgaaggtgagggggtcgcggcgacccgcacagcggtctggctggctagaggtccgtcttcttcgtcggcgcaatgccgcagggcggtcgctagcgtgtcgcagcgttcgccgccgttgccgtcgtcgttggagacggagggttctgcccgcaggaatgctgcggttgccttgcaggagggaaacagctcctcttcttcctcctcgttttcttcgggcttttgctcgtgaggcggcatgcgtgtgcggggacgacgggcgttgcggggcttcttggactcgtgaagcggcgccgggtcgctgtgacggagctcgtcgtcgtcctcctctccctcgtcgttgttctcatcggcctcgggcggcccggccgccgcgctgtgtgagaattccagggctgccgacaccgagtccgtatgaccgatctggaagagcatgcggtaggcctcgctgtggtaacagccgtcgaaaacttgtgcgatatccaaacctgagttcatcaacaggtgtaggaagctgttctgcaggtagtggcgcaggtgtccgatgagacggatggagcgcgcccacatgtgcggcgtctggtgcaacaagccgatgaggacgtggcacagttcgcggtggcgctcgtgtggcagcagggctaccagttgatgcacttccacgcccagcgccgatttttcgccgcagcgtttagtcagttcgtcgcgcgcgtagctcaccaccttgtcctggtgctcgcagtagtggcgcagctgggccgtgaaaaccagctggttgaagagcgcgcacacgcgcgacacagccgtctgcagctcgtcggccggcgtgggcggctcgcggagactgggctgcaggcggcagcggatactggccgtgacttgctggatctcgtgggggtccagttcggccggcgcgcgcttgagctgtgcgatgccctggtggaacttgcggtaatcgcgctcggtgcagaaaacgaagaggttgctgttgcggcgcgagcagccgccgggcggtacgggcaagtgcttcagcagcagcttcttcttgccttcggcgcgtaccgtgcccttgtacgctttggaaatcgagcctgccacgttgtcacgcatctcggcggctcgcaggactgaatcgtcgttggagaagtctcgggtggtgatgatgaagttcatgacgacgacggcggtggggcggtaatagtataggtccgtgcgagcaggccgccgccgtgggggccgcggagggaggagagggacgggaacgatcaccgctcggagaaaacaacgtcgacgggggacgtcgtttttatcgtaccgtgccgagacagaagttgcgccggacggcgttgtggcgcgcaggggctccgacgtggcgttataatgaagccggggcgccactcctacgccacgcgattggccgtcggcgtccgcaatcgggcgaaatctgtgtaccgtgatgacagatcagggggacgtgtaccgtatatgaggggaaatggcgacgggttctggtgctttctgaataaagtaacaggaaagctcataccccgctgaggttatgatgcgattgtgagagtcgatgggggatttttgtggatgtgtcgttggacgcggttttctggccgcctttccacgtaccgctgggaaaattgaaagacacgctgcgtttggcgtgctgattgcagtttttgctattggggtctaatgacgtagccactgattgtgaattgttgccagccgctagatttgtctccgctgtagctcgctgattctgctgcgatctcaggaaagcgcggcggtccagcaactggccgcggaaacactgccgcatacgctgcagaaagtcatgacccagcagtgcgtacaggatgggattaatgaggcagtgcaaatggggaaccaggcgtgccagcgtgccaatggtgcgtcgcagtgtgaggtgttcacatttcgtggaccaggcggttgtggcgtaactgttgaagatcatgagagagatgtaaggtgtctgtagcgctacgaaggagatgagcaacacgctgacaaaagttaaggtgcgactcctttgtttttgtgacgtgcgttgtacggtcgagtagaagaaggcgtagaaccacgtcatcatgatcacgggtgcggcgccccacaccagcgtcagaagcaccttccacgaaagtagtactgtgtgcacctcgtcggccacaaagtacagtacgcaggtggcgtgcccagtggcattagtggtatcattggcttcatgatgcattactaccgtagtgtagacagccgcgggcatggaaaaaattagcccggcgagccatgtcaatatcaaaattgtataggtggagcggtacgattggcgtgcgtaaattcgcttgtgaaggacgcgatagcggtcggcggcgatcaaggctacggtggcaaagcccactgtgcaacttgagtagtagatcaccgacaggaatttgcacgaggccacgccggccggtagcagccactgattgctgagcacgataaagggtaacacggtaagcgtgagaaagttagtggaatagaggttggtcatgtagatggtgggcgtcgaatagccaagcacgcgattggtgagcagttgcgtgaccaacactatagcgttgagcggaccgcccacgaagatgataagcgtattgagcacggcttcggtggtgcggatggcgaacagcggccccgtcatgttgcaagtgtcattgatgtgcggagtagtggtgttgcgggtctgggcgaaacagcacacggtgcaaaaaacagaagaaacaagtcagcggcgcttaaaagaaaaccgcgtatccgcctccgctattaaactaccccccctccctttgggtgggacgctcaccgagttgtggatgatggtgtccatcgcgggcgaatagcagaccgcgggcgcagtccggggcgacgacgcttccgggttctggagaaaagccagcatgagtttgcagtttatcggtctacagcggcgcgatgtggtgtccctggtcaactttctgcgccatctcacgcaaaagcccgacgtggatctcgaggcacaccccaagatcctgaaaaaatgtggcgaaaaacgcctgcaccggcgtacggtgctgttcaacgagctcatgctttggttgggatactaccgcgagctgcgtttccacaaccccgacctctcctcggtgctcgaggagttcgaggtgcgttgcgcggccgtggcgcgtcgcggctacacttacccgttcggtgatcgtggtaaggcgcgtgaccacctggctgtgctagaccgtaccgaattcgatacggacgtgcgccacgatgctgagattgtggagcgcgcgctcgtaagcgcggtcattctggccaagatgtcggtgcgcgagacgctggtcacagccatcggccagacggaacccatcgcttttgtgcacctcaaggatacggaggtgcagcgcattgaagaaaacctggagggtgtgcgccgtaacatgttctgcgtgaaaccgctcgaccttaacctggaccggcacgccaacacggcgctggtcaacgccgtcaacaagctcgtgtacacgggccgtctcatcatgaacgtgcgaaggtcttgggaggagctggagcgcaaatgtctggcgcgcattcaggagcgctgcaagctgctggtcaaggagctgcgcatgtgcctttcctttgattccaactactgtcgcaatatcctcaagcacgccgtggaaaacggcgactcggccgacacgctgctggagctgctcatcgaggactttgacatctacgtggacagcttcccgcagtcggcgcacacctttttgggcgcgcgctcgccgtcgttggagtttgatgatgacgccaatctcctctcgctcggcggcggttcagccttctcgtcggtacccaagaaacatgtccccacgcagccgctggacggctggagctggatcgccagtccctggaagggacacaaaccgttccgcttcgaggcccatggttctctggcaccggccgccgaagcccacgctgcccgttcggcggccgtcggctattacgacgaagaggaaaagcgtcgcgagcggcagaaacgggtggacgacgaggtagtgcagcgtgagaaacagcagctgaaggcttgggaggagaggcagcagaacctgcagcaacgtcagcagcaaccaccgcccccggcacgtaaaccaagcgcctcccggaggctctttggctccagtgccgacgaggacgacgacgacgatgatgatgatgacgagaaaaacatctttacgcccatcaagaaaccgggaactagcggcaagggcgccgctagtggtggcggtgtttccagcattttcagcggcctgttatcctcgggcagtcagaaaccgaccagcggtcccttgaacatcccgcagcaacaacagcgtcacgcggctttcagtctcgtctccccgcaggtgaccaaggccagcccgggaagggtccgtcgggacagcgcgtgggacgtgaggccgctcacggagaccagaggggatcttttctcgggcgacgaggattccgacagctcggatggctatccccccaaccgtcaggatccgcgtttcaccgacacgctggtggatatcacggataccgagacgaacgtcaaaccgcccgtcaccaccgcgtacaagttcgagcaaccgacgttgacgttcggcgccggagttaacgtccctgctggcgccggcgctgccatcctcacgccgacgcctgtcaatccttctacggcccccgctccggccccgacacctaccttcgcgggtacccaaaccccggtcaacggtaactcgccctgggctccgacggcgccgttgcccggggatatgaaccccgccaactggccgcgcgaacgcgcgtgggccctcaggaatcctcacctggctcacaatcccttcaggatgcctacgacttccacggcttctcaaaacaccgtgtccaccacccctcggaggccgtcgactccacgcgccgcggtgacacaaacagcgtctcagaacaccgctgatgaggtttgggctttaagggaccaaactgcagagtcaccggtcgaagacagcgaggaggaagacgacgactcctcggacaccggctccgtcgtcagcctgggacacacaacaccgtcgtccgattacaacgacgtcatttcgcctcccagtcagacgcccgagcagtcgacgccgtccagaatacgtaaagctaagttatcgtctccaatgacgacgacatccacgaaccagaaaccggtgctgggcaagcgagtcgcgacgccgcacgcgtccgcccgagcgcagacggtgacgtcgacaccggttcagggaaaggtagagaaacaggtgtcgggcacgccgtcgacggtacccgccacgctgttgcaacctcaaccggcttcgtctaaaacgacgtcatcaaggaacgtggcttctggcgcgggaacctcttccgcttcggctcgacagccgtcagcttcggcgtccgttttgtcgcccacggaggatgatatcgtgtctcccgccacatcgccgctgcccatgctttcgtcagcctctccgtccccggccaagagtgcccccccgtctccggtgaaaggccggggcagccgcgtcggtgttgttccttccttgaaacctactttgggcggcaaggcggtggtaggtcgaccgccctcggtccccgtgagcggtagcgcgccgggtcgcctgtccggcaccagccgggccgcctcgaccacgccgacgtatcccgcggtaaccaccgtttacccaccgtcgtctacggccaaaagcagcgtatcgaatgcgccgcctgtggcctccccctccatcctgaaaccgggggcgagcgcggctttgcaatcacgccgctcgacggggaccgccgccgtaggttcccccgtcaagagcacgacgggcatgaaaacggtggctttcgacctatcgtcgccccagaagagcggtacggggccgcaaccgggttctgccggcatggggggcgccaaaacgccgtcggacgccgtgcagaacatcctccaaaagatcgagaagattaagaacacggaggaatagttaagaaacacacacgcagacgtactttttaatgaaaccatcggatagtgacgtgtcgggaaaggaggacggacggagggtcagggatggggagacgtgagaaagttgtccgcgggcaattgcatgtcgcccagaaagaacgtggttgctccggcggcgtgcatctgccgaaacaccgtgtggtgattgtacgagtacacgttaccgtcgccctcggtgatttgatacaacgtggcgatgggggtgccctgcgggatcacgatggaacgcgtgcgcgtccacagcgtgactttgagcggctcgccgccgcgccacacgctgagccccgtgtaaaaggcgtcctcgtgtggcaagttggccaccaagaaacaccggtctgtgatctgcacgtagcgcaagtccaactccaccgtctgccgcggttgcaccccgaagtggatatcgtaaggcgcgtgcaccgtgagcgaaaacacgttgggctcattgagaagcggacagttgagcgcgtcgccgctaaaaaagagtgacgggttgcggctgaatcgcaggtcgtacccgcgctgcgcgctcgtcagcaggtagaaggaaaaggcgcgcggcatgttgcgcgccgtgatcttgtccgagacgcggtgacagaaggaggtggccacggtgcccagcagttggcgctgttccgcgtccacgcatagtgaatccacgttgacggtgaaaatgagacccatgaattcgtactgcacgtttttggacgcgatccacgcctcgtcctcgccgggtagcgccgcctcgtcgtcgtccatcgtgccgcggaactgcgcgaggtagcgcgtaatttttttgtgtccgtacgtggttacgcgcttgctgatccaggtcagatggtccacgcgacacagcagcgtcgcgccatgccgcgtgacgctgacccgtccaaagggcgccgcctcctccaaccccgcaacgccgctcggagcaccgccgcagcccggctttcccggcgtcgtgaaaggcacggcgtaatgcgggcaggcgtgcggcacgaagggcaccatgaccagttgtgtgtgaagaaaaccgatctgcaccgcctgcgactgccgcatggtttcctcgtcgtaaaccgccatggacgagcagagcccgcccttggtgatgagcggttgtagcaccacggagctctcgctggtggagcagagcagaaagaagagctcggcgtacgccgccttgggcgtcaccacgttggaccagtcgtacttgtagccgcagccctgcgtgttgttgtaaatgacgggaaacgagagaaagatgcagccctgcacgtacgaagctttctccgtcacgtttgaggccgtgttgtactgctcggtgatggacaccaagtacgactcgtaggccgtcaggtgcgaggccgaacggtgaatcttggcgtggcgcacgcagcgaccgtagttgtcgcggtccgcgtcgcgtagcgcttcgatccacgaggtcaccacgtcctgcgccggcagacgatagtcctgctcggggtccatgtggcggcacagccgcaggcgctctgccagttggcgagggataccgtcgtgcgaccttttgaccgcggtggtgcctgtcgttcttgtctcccctccttcgttctccctgttttctcttctctcattcccggtctccggacccgcagccgctacctcttgctccgcggttttctcgcccacctcgctcgtcgctgtcgccgccaccgcagcggcggcgacggacggcggcggtaacagcagctccgtgaagctgacgagcggcagcggcgacgacggtggcggcgacgacacggcgacggtcaacagggtcacaagcgcgggtttgtcccccataatctggtcgccgccaccgccgtcgttgccggtccccgtttcctccggcgccgcggtttccgccgtctccggatgagcggccgcggcgcgggctcggcgtcccgccgtccgagacggtgtatataaaccgcgtcggcctcgccggcccgagcgcgccggggagaagaacctcttcccgggccccgcgttcaagacggcgtgccgtgacgctcgatgggtccgcttcatcagactgcgtacgctttggagcgtcagacccagggcgcatgtagccgacttggaggactttgccgccttttatcgcaccctctcggacagtgagcagcaggagttcgagcaagaagccgaactcgcctcccgctcacaacgcgtgcgacacctgcgcgaggcccggcgccagctcaagatggacctgatgtgtcacggcggttgaaaacgcgcatgatctcgcggagccatctacgcgcctgtcagggcgatgacgacatcagcgatgacggctcctgatacgcgccggcagctgcagcatgtggagacgctgcgtcggtttctgcgcggcgacagctgctttgtgcacgatctccggggcatgatggactatcacgacgggctctcgcgccgtcaacagcgtgccttttgccgcgcgggtcgcgtgttgacggacccggagcccatccagagcgaagcggagggggagaataaacagtttacggagcacacacacaaagtagtctcgttttttattaaaagtgtctttgtatttccctatcttgtgttgcccaactgctgtcaggtctccgtagatcgctcccgggtgcccgagacggggggcagatggctataaaaacccaagtagcggcgcgccccggcgttcagtcgcggctgagcgtgtggaggacggggtggagcgggtcgccgaggctactgctgcttctgcttttttgtctcctgtggatcgtcgcggactgccggcatgtccggccgtcgcaagggctgctcggcggccacggcgtcttcctcctcgtcgtcgccgccgtcgcgccttcctcctctgcccgggcacgcacgtcggccgcgtcgcaaacgctgcttggtacccgaggtcttttgcacgcgcgacttggccgacctgtgcgtgcgacgcgactatgagggcctgcggcgttacttgcggcgcttcgagggctcgtgcgtgtcgctgggctggccctcgcagtgcatctacgtggtcgggggcgagcattcgccgcactcgctgaccgagatcgatctggagcactgccagaacgactttttcggcgaattccgagctctacatctcattggcacggtctcgcacgccacctgccggtaccaggtgttcgtggacgcgtacggcgccgtgttcgcctacgacgcgcaagaggactgcctgtacgagttggcctcggatctggccggattttttgccaagggcatgatccgctgcgacccggtgcacgaatccatctgcgcgcgtctgcaacccaacgtgcccttggtgcatcccgatcatcgggccgagctgtgccgccgctcgcgcgcctccgctcgcggccgctacctacgttcgctgctggctttccgcgagttgctggcttgcgaggacaccgccgctcgctgcgcctacgtagaggcgcatcgcgaggcgcagctgaccctcatctggcccgagaagcattccctggtgctgcgcacggcgcgcgatctggggctctcggcctcgatgctgcgccgctttcaacgttcgttgtacacgcgcgagcccgtcatgccgctgggcgagatcgagggcgccgaggacaagaccttctttcaccgcgtgcggattctctgcggcgacacgggcaccgtgtacgcagcgctggtggggcaggataagttggtgcggctggcgcgcgacctcaggggcttcgtgcgcgtggggctggcgctgctcatcgacgactttcgctacgagagcatcggccccgtggaccgcagctcgctgtacgaggccaatcccgagctgagactgccgttcaaaaagcgtaggtgagtcatcagtgtacacacgcccagaaatagagcgacggtgtttttataaccgaaagtagcgtgtttgagacacgcgcttataatcggttttttcaccgtcgtcgctctaggtttgattttcgcgctcttgtgtctcccgacaggctcgtcgtgggctactttgactcgctctcgtcgctctatctgcgcgggcagcccaagttcagcagcatctggcgcggtctgcgtgatgcctggacccacaagcgcccgaagccgcgcgagcgtgcgagcggggttcacctgcagcgctacgtgcgcgccacggcgggtcgttggctcccgctgtgctggccgccgctgcacggcatcatgctgggcgacactcagtactttggggtggtgcgcgatcacaagacctaccggcgcttctcgtgcctgcgccaggctggccgcttgtactttatcggcctcgtcagtgtgtacgaatgcgtgccggatgcaaacacggcgcccgagatctgggtctccgggcacgggcacgcctttgcgtacctgcccggcgaggacaaggtgtacgtgctggggctctcgttcggcgagttttttgagaacggcctctttgccgtgtacagcttctttgagcgcgactacgtggatgagatcgtagagggcgcgtggtttaagcacaccttcgcgggcatgtacgaactctcccagatactgcacgaccgcaccaatctgctgcgcgtatgtcagctccacgccggtagcaagatccgcctgggcggctcgcccgcttgtactttcactttcggctcgtggaacgtggccgaggccgacgaggccaacaattttgtgatcggcgtgctagaacaggcccactttgtagtcatcggatggatggaacccgtgaacaaagccgtatttatggacgcgcacggcggcattcacgtactgctgtacggtacgatgctggttaagttggccgagacgttgcgcggttttatccgtcagggctccttctggtttcgttgcccacggcgtttttgcttctcgccgttggactcgagcgcaaccgtcgccgcgaaaccggtgagcagccatacatcgcccgcgtacgacgtcagcgagtacgtgttttcgggccgtagcgtgctggatagcgtgagcggcacgggggcgtcgtgaaggaggagactgtgatgactagctatatagccgctgtctggctttaccgccgtcgctccgcgtcgcttcgtcgccaccttcttcttcctctcagtcatgaaccccgtggatcagccgccgcctccactgccaacccagcagccggaggagcaggctaaagaagaccatgacgacggtgacgagcgcctatttcgcgatccgctcaccacgtacgagtatctcgacgactgtcgtgatgatgaggagttttgtcaccagttcctgcgcgcctacctgacgccgattcgtaatcgacaggaggctgtgcgcgccggcctgttgtgtcgcacgcccgaggatctggtggccgccggcggtcagaaaaagaaaacgccggcgcccaaacaccccaagcacgccatggtgtacattcgccgcagctgtctggtccattcggcctgcgctacggcgcacggcaagtacgacatccgcggtctgacgctcgagtcggacctcgctgtctgggccgcgcttcgaggcgtgcccttgccgcccgatccgcagcattttcgctggctcaacgccggcgctttccgccgtctggtgcacgaggcgcagtacttgccagagatcagtcgcgccgccaaacgcatcgctctggccgtggccacggggcaatacgtggtgtgcacgttgctcgattacaagacctttgggacgcgcacccattacttgcggcagctatgctcgatgaccgaggagctgtacctgcgcctggacggcaccctgtgcctgtttctggaccccgaggagcgcgaactcatcggccgttgcctgccggcggccctgtgccgcgggttgcccgtcaagtaccggacgcaccgcgccgccgtttttttccacgccacgtttatggcgcgggccgaagcggcgttaaaggacctctacgcggccttttgcgagtgcggcgacgggcgcgacgacggcggtaatcacaacggtaaccacggcggcggcgaccactcctctttgtcgctttccgcggcggcgtctcaccattcccgtttggagcacgccgagctgaggctggagcgcaaccgacacctgggtgcgtttcacctgccggcgattcgccacctcacggccggcgacgtggcccgcgtccagaacagcgtatcacgtgacctgggcttcgccgactggtcgcagacgctggtcgacgactactttctgctccccgcgggctgggcctgtgccaacccgcgtcgcggctacgccatgtacctggcctccaacgccgtactggccctgcgtatcattcggctgctgcgcgccagtatacgtcacgagtacacggcgtgtatacgtatgttgagcggggacgtgcagcggctcatcaggctgtttaaaggcgaggctgcgctgctgcgcaagggactcgctcagaaccccgtgcaacgtcgagaactgtcgcggttccgcaaacacgtccacgatctgaagcgcattcgcttcaccgaggacacgttcgtggagaccttctgcgactttctcgagctggtgcagcggattcccgactaccgcagcgtgtcgctgcgcatcaagcgcgagctgctgtgcctgcacgttttcaagctgcgccggggctgtcgcgcgccgccgacgcccgagacggcgcgcgtccagcgcctgctctggcactcgctgcgacacggggacgcgccgcaggatcgcacgcggctgccgcagttcagctcggcgctctcggacgccgagctgagcaaccacgccaaccgctgccgccgcaaggccccgctggaactcggacccgccgtcgtcgccgccccggggccctcggtgcgctaccgggcccacattcaaaagtttgagcgtcttcatgtacgccgttttcggcctcacgaggtcggaggtcacgccacatgaagccgcggcggcgcgttataagcaccgtggggtcatcgaccgacgaggcgcggcgatgacgagcaggcgcgcacccgacggcggtttgaatttagacgattttatgcgccgccagcgcggtcgccacctggatctgccctatccgcgcggctacacgttgtttgtctgcgacgtggaggagaccatcctcaccccgcgcgacgtagaatactggaagctgctggtggtgacccagggtcagttgcgcgtcatcggcaccatcggactcgccaaccttttcagttgggaccgcagcgtggccggcgtggcggccgacggcagcgtgctgtgctacgagatcagccgtgagaactttgtggtgcgcgccgccgactcgctgccgcagctgctggagcgcggcctgctacacagctactttgaagacgtggagcgcgctgcgcagggcagactgcgtcacggcaaccgctcgggcctgcgacgcgacgccgacggccaggtcatccgcgagtcggcctgctacgtgagccgcgcgctgctgcgtcaccgtgtgacgccgggcaagcaagaaatcaccgacgcgatgttcgaagccggcaacgtgccatcagcgctgttgccgtaacaaaataggaaggaaaaaaaccacacgtgaaaaaaaaaacccggagaagacagagaggacgagcgtccacacaccgctttggtcgtagacgcatttttattcttggtacattaaaaaaaaaaacaacacacatactttcctgtgactttctatcataaactgttccgtcctgctgcttcgtcccaccatcagcaacagtattccccgctgtcgcggcggtcgcgacggtgacggtcccgctcgtcgcgttgaggatagtcgcgcggcggcagcgggggtggtggggatcggcagatttgttcggggtgattaccgttcgcttccataaacgctttaagagccatctcgcgtaacgtgtcttcttcgcgttcgtcgggggggacctggctaaagattttgagcagggtgacggaggagacacccgtgtgttcgaccggaatgtgtcgactcgagggctgcgcttgcaaccgcgccacgcatatgtcgcgggtgatgagtttctggcgcaggtgggtggcgcgcgggtcgcgcaacagcggatcacgcaccataaactcgcctacgaggcgttgggagctactgctgccgccggtgtcaccgataataggtctgtcgggacaggccagcagacgcagggcgcagtacacgtagtcggtgcaaatgaaggcgtcctgctgacgcacgacgcgtaaaaagtcaaacaacgccggcgtgctcgcgtagagcgcgtagtcgtagttttgactgacggcccagtagagcacgtcactaagctgcgcgtagtcttcgcgcaacgacggcagttgtacatagatgaggtaacacagctccgagatgctctgcagctggtgctggagatagcagcgcagcacgcgaatggtgcgttgaaagtgcgtgatcataagctcgacgcctactaggaacgccagatcgttgagcgtgtgctcttcgcatatctcttcgaccgaaagcagccggagcatgccccggtggttctcgttgagacgctgcaggttttgccgatagaggtagagcgcgccgcgcgaggtgtagtgggcggtatagaagagcacgttgtaatcgcgtagcgtctggtagacctcggtgagccgcggcgattcgggcgtgccgcgatgccgcagctcttcgtccagccgtcgcagagacgtggcgtactggccgtccgtcactcctttgcgtgacgtgagaaagtgaagcgctagcgcggccgcacgccccgaacggctctggttgttgacctgcgtggctacccggcgtaccgtgtcgcttcgcacggtggtccgtatggcctccatcatgtggcgcgctttcttttgcgccacgtagtaatagttgatgatcaccgcgtgcgtgattatccgacgcgtgagatcgcgctcgccaggcgctacgttgtttaagacggggtcgacgaggctggtgagcgcgaaggccggcatgggtatgcagtcgttgaggcggcggaggtgctgcacgtcaaagtcttgtagcacgaattttagatactcaacgtgctgcggcgcgaccacgctgggctcgaagcccagattgtcagccacgctgacccggtaacattcgcgctcaaagtcttcgatgtcgctgtcacagaaggaaaactcatcgccctcgacagcggacggttcgcctggcgccacgggactggtgcttctgctactgttactggtggtgcggctgctgctgccgccgctgctgctgttatcgtcgccaccgtcgccggcgccgttctcgggcagcgagggtacactaggcggtcgcgagactttaggcgacttgccggccttgggtgtcgccggcgagccccgaggcgcgcccgctgcgatctgcggttgccgacgcgacgacgatcgtttcttgtcgctcggtttcttggcggcgccggcggcgccggtctcgcgcacgagctcgaaggacgacggggcgtccgaggagacactgtagggcgacaaaccggcctccatgcgatccagatcttctgtggcgctgcgcgcccgcgtgttcgtgaaaacgctgtcctccgcctcctcatccgccggcgtgtcctcgttgctcgaggggatataaatcaccgtcgagggttcgccagagcgacgtgacgagctgcggcgccgcgacgacatcctctcgtctgctgaggtgcgttcggctcagttgcttacctgcatacatggaggagacccgggcgggacgttatatagtgagggccggctccggcgggcaaaccgaagatacagcctcgggcgcggaaagtgtcctcgccacgctggccgcggtgaggacaagaagacggagcgtggtgtgcgacgggcccccgggctcgcccaccgactcggcgcgtcacatgagcgatctggctagcctggcgctcacggccgagttcggcctgggctgtctggaagcttacgtgcgcatcaacgcaggccaggtgttgcccgtggtctggccgccgggctggaacctagtgctgcaggagatcgagacggacgaggacttcaaaccggaggacgtgaaagcttggagtcactacctgtgctgccagacgcgcctggccttcgtgggtcgcttcgtgaacgagggcgtgttgtcgccggatcagcagaagaagaccgccgtgtgcctcatctcggacgagggctatgtcttttgctatgtacgcgaggacaccgccgtctactacctggcccgcaacctcatggagtttgcgcgcgtcgggctgcgcgccgtcgagaccctgcactgcatgcgctacctgacctcgtcgttggttaagcgctactttcgtccgctgttgcgcgcctggagcctcggtttggataccatggcgcgattcatcatccgtcaccacgggcagttcatgccgctgacgtacccgccgggaacggaactgcgtctatgcaacctcaggtgtttcgaaaacagcgtggaaggcggtcacttgctgcgcaacatcaaaaccgctttcggaatgcgcgttctcggcttgggaaccgtcagcctcaagggcgagaacgcgccctttcctcacttgcgctggcccgtcgaccttatccccatcgtcgtcgcctataccggggccgtctacgcctgcgacgtgcgcgacgaccgctacatccggctgggagataatctcaacacgttcatgtgtctgggacttaacctgctgtttgaaaaccgacgtttcagcggccacaacggcatctacgatcgcgtgcccgactgccccaaaggacgtcagcaccgttgactgtgacgccacgagtgacgacgacgctgcttggggcataaaacaccgacgctacttcccgtttgactcgcgtgccaattttttcgctgccaacgccgtcaaggccgcctcttctggccctccgccacccttcgctcgagcacggcggtgttttgccgtcgttttttttttctggatcggcccgatttctttttgtccaccggcgcgcaaccgcgatgtcggtaatcaaggactgttttctcaatctgctcgaccgctggaggcctcctaagacgtcgcgaccgtggaaacccgggcaacgcgtggccctggtctggcccaaagaccgctgcctcgttatccggcgtcgctggcgcttggtgcgcgacgaaggacgggatgcacagcgtctggccagctacctctgctgccccgagccgctgcgtttcgtcggcagcatctgcacctacaactttctcaaacacaagggcgatcacaacgtgccgtctgaactgtacctgggcgcctcgggcgccatgtacctgtggaccgaccacatctactctgactcgttgacctttgtggccgagagcatcactgaatttctcaacatcggtttgcgacgctgcaacttcatcaccgtcccagaggagctgccgcacaccgcctcgcttagagcgctggccggctgcatgcacatccacgcgttcgcgcagtggcgtgctatgtatcgcggccgaatcatggtcgtaggtgattacagcgtcattcgcgtctccacgattcggctgtacgactggagcgagattaacgactggagggtcatggtcggcagtaaccacgtggaacctttaggctggttggtgagcccctacgacgtgatcaacctcttcgtggacgactgtatgcgcgtctttgctgccaacaatcagcacgtttgcatcgtggccgacagtttgatggagtttgtgactcgcggcatgacacgctgccacgaaaacggcatttattacggaaccaggagcatgcggaagctaaatcagcctacctgtccttacggagtggaccaccaactttttgacaacgcgtgaacccgcgtctcccacggaccgtgtgccttttttttttttcccgttcctgtaaataaaaagctgttttttatttttcatacgaaccgctcgagtcgcgtgtgttttgacggggctgggtggggagggaaggtcgcgccgccgcagcatcccgcatagcctctacaaactagcattctggtgagatacatgttcataaactctcacgggaaggctagttagacaggctatgggaagaaaccgtgtttcgcgtgccgaatacgaaagaaaaaagaccggaggcggggtgtttttagagcagaaccttacagctttttaataaaaaataaaatagtcaacatggtctttaacccttgggatctgctgctgctactgggtcttttcattttctttggtgtgttcttccttgtgttcgtcggtcttctcttgtggttgctgatggttacctccatctgtatccgtaatcaaaacgtcatagtctcccccggagtaatcttcatctccgtcggtggtggaccccccctgactgagagttacgtccttgttacgagtggtattaccatcggagttagtgctggtactgggttgttccaccgtcacgctgcaaaaacacgataaccgcgttcacaatcacgtcattttttgtatctcttacctgtgttgagttccctagattccgtttacctgcgcttcgatttctgagaaggtgccgccaaagccaccgtcaaggtcacggctagtacgctcaagatccatagcctccgagccatgctgaggtcttgtcggcgtcgctgatgacgaacgcgtctggctgtgtgccgttaaataccttgggtgacgacatcttgaggtcatgtggccgcttctgaaaaacaacgtagtccggacgaatcgcagatacgcggtttttcaacctcgacggtttacgcctcgcccccaacatgacgcgttcgggacgaaagacgacgtcaggggattcacggtatttagccatgcagcgtgcggcgcctctctcatggatccactgtcaccgtcgcaatgggaggtagccctgttccccagctcaccaccgtcactcaaggactcatgccatctgtgcgcatggactttcgggctcgccggcctttgcgccgcttggctttctacgcgccgcgagctcgtcggaggcttttccagaatcatatacatccagaacagcgtcgagtgctggttcatgagggagacgaagagatgttgccggatctgccgatggagatcgacatcgtcatcgaccgacctccgcaacagcccctgcccaatccactggtgctactgctggacgatgttcccccccatgtgcccggttttgctccctaccgcgtcccccgtccccaccccatgattcccgaagaacattgggaccagttttaaataaaaacattttatttacatctgtacagggatcatataaaagtctatatatccagtccattgtcagtatttttgtgctcaagttcagtgtagacttgtggaaaatatatagtccgtaccgcttggggctcagtccaaagtccgtcatgatggtatgcagattaccatgtgcgtgggctcaggcgacgacggaggagacggtgggaattctattaagtgaggaggtcgtggaggaagtggaggtggtaatgtccacattttgctttcccggatccaagggacgagcagtcgccgcgtgcggataggcacctggacttcaatgtccttgtgcgttaacaagttttctttttcctcctcttcctcagtgaattctggcaagcgttcaaagccgcgtgggcatatcagaagtcggtcacagcgatagtaacagatgaggataagcagcgataaggaagcgagtatgatggatattatacttgtgattcctatgcaggacatggagaacaagtacgtggttctacgagtcatgtcgaatatataagcttcatgaagtccgcatgtaagcaccgccacggaattcaggatagcataactcatgaattcctttggtacgtcaccttcagatttgttgtaccattccaccgtggtgttgagggtatactgtttagcgggcagcgtgcagcgtgtttcattttttaacaactcgattctggtggtgttatgagaagtatcattatcgacccactttttccatagttcgcacatgcccaaaagatatcccgagactgtacttccacaggtgttatttgtatagttgtaggcatttccagagtaccaataagtatcgttttgagtacagttcaaaagccagagggtaatcaggtaagactcaccgcggttgatgcagttttttgtcaggttagctacgctccaattatctccactggacgcattagctgatatgttgccttggatgaaattgaatgtcccggttaggtcggtgtagtttgaatacaaacctccaacggctgtgcgggtgactccgttgggcccggtaaggagagatacaaagatggtatttgtattattatttcgggcgtcattgttcgttgtcacctgcatccagtggtaattcagcatcaccagcatagcatgtatcccgagcatcttgccggacagagcataacggcgtttgtatatataaagaccgttccaacgcaacattgaggtgtcattgacgtctttattgacgtggttttaccgcaacttcctcttttcgcaggttgaatgaggaacccgcgtagatccccaacgccggtttcatcataaaccaccgtgagaaccgggcgcgggtttcaacacgaaaccgcgtcactcacggacgtaggttatttcgaaaacctacgttaatcctgaacgcgtttcgtgtcacgcgtccctgcgactcacatctagctcgtcttctgacgctacccacgaatttcgtaaccgaatccgcttcagcgtttccattaaactggcgcaatccacttctgactgactcggtcgctcgatgcgcacggatccgtgatctaacacgaacatagtgtagtgggaattcgtggcgatggacgtcaaccgaccgcagaacccatcacgagtgcgtcgcgtgagaaacatgaccgtgttgacgggggcacgcggtaaccgacgtcgaaacaactcatacagggcgttgctggtcatgacgaccggaccttgcgatagcgccacgcaaaggccaggttacgtaggtattgtttcaaagtggtaaagtagtgcaggaacgcgaatagcaaagcgcacaaaagcagggctaggaggacactgctgatggtcatggtgttatagcgtttgctagctgtggggtgatcagggacctcccccgaggaactgtcgtcaggtgaggtaatgctgatggggatttccaccgtccaattaccgtgtgtaacgcggcaggtgtagttttgattgcaaaagatggctacgtaacatccctgatggaaagtcccatcgaaggtgggaagtagcggattgcattgaggctcgctatcctcgggcaccttatcaccgtaatgaataaaagtaatattaatttcccctggaaagaacccgtaagatgtacagaacgcttcagctctgttgtcattgtggtttcggacaccgcctttcaccactgggtgggtgacgggggtctgaaacccgctatagatgacggaccactcggtgcagttgcccataagatagttcctttgtattgtagtatccccctcgctgatgtttttaattttaccgtcgatgtacgttttgttttgcttcaaccaactaatttcgtaattggggcccgtccatagtgtcaggttatccttgagctccattaaagtttccccgtcccacccaaatccctcgtaaccggctacaaaactaccgttttccgtggtattacactcgtgcgtccacgtcagcacgctctgtgattggtaacccaacgcaatttccagctctaacaggttttgctcggtttggttaaaaataaggtcacctttggctctttccccgtccaggtaggtggggtaggccgccgagacgttagccatccaagaaatggtaccgttggcccgacttgacgctttatcgctggaattaacgtgataggtaaaaaagtgttgcccgtcaaaaatccccacaacggtcaacgtcatatgcgatgtatcatcgaaaatccccgtgtacccgtaacgcaacacgtgcattcccaccactctcaacatccacagcacaaacaacgtcagacaccacgttgtcatcatggcgttttattaacagttcctcggacatgatcagcgttatatactttcagtccgcgttttgacccctcctatcttctttgatgatgtatcctcttagccgtgtgttgtttactcctcctcttcgggagaccgtgccggatccgacatcagtggctccgagtcctcccgaggaaagaaaagtcgtcgaaacagccagcacaaatcgtgccaaaatagaaggacggccgcctttgttcttcttttgggaatctcggcgggcctctgggggccgcacggagcgcgacgtcgaggtagatgtttgcggcgcctgtggtaaaccgtggtgtcccaggatctcttagacacctgttcgtccagaatcaacatttccaaccgacagtgacggggccggccgacgaagtgtgtgaggagcgcgtgatccatgctcgtggcaacggcgtgccgcgctcgtgtcaaagagacccgtccacggaggacatggccttcttatagcagcgtgaacgttgcacgtggcctttgcggttatccgttcagtcctcggtgcgtaaccgctggtatcgatgcggcaggcgaatgcgcagccgctgacacagtcgctgggggatccgtagggccaacaagaagaagaacagagtgatggccgagaccaacacgatgtctctcgctaaggtcgcggacagttcctcgtcggcgcttacggaggggtgtttggcgagcccggatccgggcggtctcggatatagcgagcccaatcggacgtagaggcgctcgattattttcgtcgtaccgttctcgcagcgtaaacagtcatagcggcccacggtaagattagtgactatgcggctggtgtacagtttagtcacagggacggttcgcattttcagtccgtcttgcaagatgttggtggtgatgtcgctgaaattgcggatcaccgtgtcgttctggtacaaccacaggtcaaccaccgactcgttatgctgccaagtaaaagccacgccgatgatctcgtcctcggtcacattttcatagtagcagatagagatacacatcccgtgtaacgtccacgtttctccaggacggatcgaggccaactccgtcacattcaagcggcaggtcgagttggaagacttgctacccaggtcaacagcacacggggaagaggcagacaagcaaagaacaaaaaacccccatcccagcggtaccgtacctcggcgacgctccatgccggcgcctaacggtcctttgtgcgcgctcctcataagtacccaggcttttgaccccagtcggtacctacgtcagcatggagcccggtgtccgaggaagaaggaggaggagaggacaacgaggtccccggtaagattaagggtaaacatccaaaaccggtttatccccgccaatattcccaataaaatacaaaacgcgcgttccttgacatcgattcaaaatttattgtgcgcgataccgcatcgccaaccacgaacacagtccaaaaaccagaaacatgaaccacagcccaatgtccgccttctggtgatcggtccgcgtacaggcggacgtttcattcgccgaaccgcgtctggtaccgctactgtgggcgatgggaccgacgtcggagtcgcggcgttcgttggcgccgctgccgcgtcgggtaccgctgccgcagatgagcgcaccgacggcggagccgcgtcgctcgccggcgcccgtcatctgacattccgttttcctgccgtgactgcgaatcatccgcttcatggctctcctcgtttactcccgctgctgctcttcctcagagacggccgccgccgctaccgcagaggcttctcccgcggcagtttcctccgccgcctcgttttcctcttcggtgttcagacgccggtacgattcggaacaccagtagcacagcaggtggcagagggaggtcagggccaccgatcccgcggccagcagcccgatcttcggatccgtcagccagtaatccctccgcagatgatagcgccgcctagcgccgtctacccgatgccggcggctgcagttgttgtccgcgatgctctggctgatgaagggcacgcacagttcgcgctcgtcctcctcgcacgagggcagcagacccgaggtgccggggatgtagtggaccacgcggtgccgttcaccctcccaaccacagtttatactgcgcaacctggagggatcgggcgtccacaggtaccgcgtctgtgagcgagatccgaaagctaggtcgcaggagcggtccgagtggcgcaggtcgtgcacgtcggccaccaacgccgtggtctcggtcgccaggctgtgagtctcgttgcccagcacgcaggtgtaggtgcccgcggtctcggtgatgagccgaaacgagaggcttagccgctgcgccgcgccgccgtcctcgaagcgccagcgcccgccggcgatgtaacagctagcgtcgttgtgtaacacttgaccgctgcgtgcgtccaccaccagcgaacgcacgatctcgggccagtagcagaggtggactcggatagagacctctggccagtcgtgcgcggggaagatgcaggccacctccagacggtcgccgtaaggcagcaactgcggtgagcccgggttccgctcgcggttgcggtcgcgcaccggctgcagacagggcgaacgcaccaccggaggcgcatcgaggcagcagttgccccactcgctccaggcgatcagtagcggcagccacagcggcggcagccgaccaccgcccatacctgtctgtgtttcagagctccttaaaaagaccacacgcgaccacatattatatataaggtgcgattggcaaattatctttattggtagtgtttgacacgcataagcgaccggggatggggggaaataaaggaatggctcggtgtattctaaatcgtcatgggtcgtcgaaccaggtagctcgagacccacagtcctaagcatagacgaaacagggcacgatgcgggggttctcggggcggacaggccacggtcagcgtatttgtcgtcattggcggcgattcacacggtccaccttcctcgttctcctcctgtgacctcctattcagttctccttgtcccgctggataagtgacctgcggctcttgaacctcatgatcatcatcatatcttcccgcattattccttctctcgtcgtttccacttgctcggctcccatcattcccttctctcgcgccctctctcgaaacgtcctccacttcttcacgttgagtgtgcgttgaatttcttgttttctcttccgtaagctgttgacgtggttcctcgttttgccggagcaccgtgggtgccggcggtatgacggccagttcttgcgcttcggccgctgggttctgtcctggaacccacgtgcgacgccacaacgtggttctttccacaaaccacgtacgtattcgcgtggccgtttggctcacgacgttgctttcctcccagcgggttctgatctggctagagacttgctgtgtccaaccgtggcaccgtaggcggaacagctgccagcggaccgtcagttgttggcgtagttgacggagtcccgcaccgccgggtcgcggtccgccggtgttgggaccgcttcccgcgggatgtctcagacgcccgcgtccgaaacaccgttggttggagaagcgtattcgcgtcaggagcagcgagtcccggctgcggaccgtcagagcgttatagcgccgtctttcgtgccgtcgccgcattacgttttcactcgcgtcgtgcctgacggtgctttctgcactatgtggtgattcggcacgttctgcgtccgcgtctcgtgcatcctctgccggctgcgatggtggatccggaggggggaacgagggtctcggaatcgcattgcgcgactgatttcgccgccgttgttcttccaccagatactgcagctcttgatactgccaacgtatcccgtctcgcgatggcagttcgggtgatacggcgtgatgctgtgatgacggcggtctcaacggccgcggggaacgcacatcgtagacgggcaaatgcgggagcgatcccgaccaaagtggcggtcggtccaggtcaacggcgtttcgccgcgtcatgaccgacgctgctctgacttggaatccggcgtgctgcatggcttggcgcactatggacagctggtacgtcgctccttgtatctcccgtagccactcgtcctcctcgacaatgtccaagccgtgggcccactgcggccgctggaaaaggagtaagaatggcagtctacacagcagcagcgggagcagatgataacgcaagaagcgaccgcagtgggcccacagcatgctcttggtctttctagggccggtcaacagctttatgaagggaatcagggacgtcggctttggaaagccccctcggatcctttcggtatcgagagcgcgcctggcttcaaatacgtcaaaggcctgtccgccgcgccagctggcacggagttggcgtttcacagtgatttcatgcaatcatttcctacgcgacttgctcacagatcggtttgagggatgagcacgatgccgtgcttgtcatgctgccagagcaaccacagcttttgcggtattcgaaagtagaaaatgataatgatgataataacgattacggccgctaaaacccagagggcgtgtgtggccacgtgttggtgctgtgggcttggttgtaacggtgtttccgctgctgtggcttcaaaaccaacgtgatgttctacgtgactgttaggggtgctggattttttgggactggagtgtttatgatgggtagtgcttatcgtcgtcttcttggcggcggtggttgttctcgtggtggttgttctttgtgttgtagtagttgtcgttctcgtagtcgtagtgggctttttggtggtggtagtggggaatgtaccgttttcgttcactgtcagattgtaacatgtgtctaaagtccatcgaaaaccatggctatgttgttggtgacgccaatcgtctagcgatgtcatagtacgataggtagtactatactgcgcggtaacgttaatgaggaggaggctgtaattactcaaacatgaaaaattaaagcgcgtgttgttgaacgttgttgttgatgtgccagtgaaaatgcataacatgtagccttgcccgcctggaccgtatgaccaacgaacttgatcgcgagggggaataacatctaccgcgttcaacgtaacgttggtacctatcttgccaaccaccggtatgcaggcatcatggaggctgatgtagacaccaaagatgcatgcagccgttaggtaaagtaccttttcgcgatgaaaggtaatgtacctgagcagcattctaccacaggtgatttccacatgttctcaggttccgtagggactgtccctatattcaaacagtgagtttgaaaccggagatatccgtccgctcacgataagtagtccgtagtgggcagaccgtcggttcctttgtaaaggtatcctctggtgtcccatttctctcggagtctttgaggaatcttgaagaaaaatagaatgacgactatgataatgatgatgataatgagaatccatgcgctgtgtgcggcatctttggttcgatgtgcctctacgttaccggtaaacgagtccgcaaagcctttcggaagacccgttacattgtaatctttaggtgacgttctccgcgtggatcttttgtgctgcgtatgtttattcggcgtggtttttaatcgcaacaacgtagttttttgtccgggttttctggtcgttgtcgttctggaaatcagcgataatgtaaaacatgttggaaactcacagttaccctttggtggacattttcgcctgcaatagtttttgggatctgagacgtttacatgaagaatgcttaatgtggaattgtgacattcatacaacagtggtgatggcaacggagtggttttcattgtcttttgtctaccaggtttaggagggtcgtaggtgcagataggatgcgtattttcgccgttgccgatgccgacgcatgactggttataccagtgtactttttgtcctggatgataaccatgtccactaccgagggtaactggatcacctactctgacagtgacctccatacaggtttcggaatatctgtaaaatatcattgcggtcacgacggaccatcggaaaagatcatggttcacgatatggttaatcagtcgccgcataacacaaacacctgttgtataaccacgtatatgtacgtcattatgtttacggtattcaaacagtgagctgaaaaataaacgtacatatctattctttttacgttttggtttccttggcgttgattctttaagcggcggcgagcataccgctgtatctgtattgtgtgaatttattccaagctttctgggggaatttgaaacaagttaaaacgatgattgttataacgataactaggggtatgatccacattgtatgtggagtggtagtgtcgtgttgtgcttcaacgttaccggtggcgtagtggaccgcggtatgtgtgaagttggttgaggtgaatgactgtgatatttctaatgaatcgtgtacagatgtaggtggatacagggatgatgtagttgtatggcaatgtgtttggtgggtaaagtgtacactaacgttataacacaagttattcggttttggtactcctcgtccgagatatttaaaggattgaaaataatagtttctactgtatgttgtggttaagttcatgagaattagtgtacgattatctgtgcattgccacacaatatttggagagtctagattggattttgtgcgttcattactttgataaagacataacttgtaaccattggtttgtctatgtaccattcaaaaacatcgtcttgaaataatgagttattaagcggatgcaagctaatattatgactgccgtatccaactgtaggggtacatggtattgccatatagttccaatactgggattttgatgtgtaaaataaaattgttatccatggaaatacctgcaaacgcttagacatcactgtcacagttccgtgtctgtcataaacacttgtccgtactgtttactgtctttccagtgatggtagatttttcgaggtgctcgtagacagatgataataaaaatgatgagaatgatgacaatgattagcatccaagaataatgcgttgccgttctttgatattgtacttccccagccgggtattctacaggttgtgggatgaccgtagtcgcgttgctgaggttcactgcagtctccgtgtttttcaatagcaatgcactggtttctaacgttgtccagtcacttctatttgtacgcgttgtattggcggtttccgtgaattcataatttccgtcataattttctgacgcagatagtcccgggctagtcattgttggcacaaaaccttctccctgataaaaagcacattactataactctggtttaccacacaacaatttccaccaccccataatgcaaacaactatcagaactaaaaacacaacaacacctaccaaggccaggtgcgtgttgttttccaaaggcgtctgattggagaatccagcgacggcacgtaattgtggtgctaaactggcgttccctgtaacgttacttttcgcgtcgatcatcgtcgatgtcgtcgtgacgatggttgttacgttactagctggagtagtttccaaaggtttgggtttcacggtcaaattataccacaggaacgtttcattttcgccgcttctcgtaaaaccttctgctccgtaacgaccggagtcgttcaacgtgaggttgaagatggtgatttggttagccgcacaacttaggcttaaacccacatagggcgtagaaagaccctctccacgtttgtaaaagcaaatgagatggctatcgttgccgtcccagcggaaccaccgtgcgctgatgtttgaagtgaagttggataccagggtaacgttccctccctgtggcccggacacgtagatgacggattccagaatcacgggggcaaacaaagttaaaatcaacagtttattgtacacataatgcactctgcagcgaaatcgtgtaaccgtcagaggatgagaacccacgtcggaagccatgatttatttaccacgttacggtttggaaacagtcatgctcaaactgccttttatttcctacattaacaaaccacgttcttcatcgtccacgtggcttcgccagcgtcgccaagccgattgaggcaaacccaaatcaacgagcaccatcacggcggcaaacagcagcatcgcaacgccccagctgccataggtgaatgccaagttagttatgttcttggataacgtcccgttttcaacacgctgttgtcgttgataaatagcgtgtccaaacgcgctggaatttgtcgtcagtctcaacggaacaagtgacacactgaatgtggagtttgtaaccagcgtgggtgtcattacggtggttgtgctttgaaccgctcgaggaaccaccgttaagttgaaacaagatagtgttatatgtttgtcggtgcagttgtaacctttttgatagtaagtgccaccgctactttcagaaacgttataaataaaaaatgttttccaagaacagccaaacgctacacggtgtcctaatgagactcgcatgcttgatccccgtaaagtgcaccataacacgggtgtgcttccattctcgtaacgtccccactgggtcacattacagcttaacggtgccggaccgtgcaattcagcgtcttgacccgctgttctagttaccgtgctacagttaggcagtccattggatgtcacggcccagctcgtagagctttcagaggcacaaaccatcaaaatcagaaccagcgcgtatctggaaacccagactttattaaaaaggcagctcggcacgccccggggcgtgcgggcaaaagctaacatgttgagtgctacatatgtgcgtgagcgcgtattcaaacagtgagttatcaagcacaccccagcccacccgttcatcttagcatgcactacccgcaaaagtccctcccaccccgtttcagactctctgactgaaaacaaatatgcaaaagcaaaacactacacacagctggctaactagctacacggtagcgacaagacgttgatagcggtatttcagaggacgggcgatgtcccggagacggtctatgcagaaacgacagatggattgcggtacgcgaaacaggctggcgaaaagcgtcaagagtcctagcaggacgaagccggtgacccaggtggtgtggaaaatcaggcctccgtagaactgcttagtgatgatgagacgactccacggaacgagttcttcctctcgcgacaacagcatcgatcggtcaggaggaggcgcgatcgccagggacggtgtacgggtgctcacgctggaggtgaatgctgcttcgtcccttgatatagccttgttactctccgcctcggtgatgtcgtaacagcaggactcgaacgcggcacaatcatagaaacgcaaaccgaccaaccacacaaaagacaacatgagctttaagcgtgatctagatacacgatacacagcaaggccgggatctacacagtcagagtagcctagaaacatgttagcgccgtagggacgcttaacatttcaaaagcaacgtaaacacaatagctacagccacgcggctctgtgaaacttcacgtgcgatctttaggacacggtcaagttgtaacaagagtaatagaaggtgaaattcgcatcttcccttttgaaatagtactttccgctgttttccgtcgtcagattcagcaacgtcaagcggttataggtgcagttatacgtcaggttcgctacttcatatctgtaatgttgttcgtcatagttaccctggagtttcgggaagaacgaacaaatggacttatgaccccatcctaacaaccagtacaaaaagtcttccgttttgttctgaagacctcgaaatgtaacgttgccgttgacggtccctgagtaattagcgcaggtaatattcttgggaatctgacggtcgggagacttccattccacaggagcagtcgtcgtgctgattgaacaagtcgcaaaaacataataacagtacgcggcaagcagtaccatctgtaataatctccacgttctaagcatcataacgatactctttcagccttacaatcaaaatattgcactagtagtgacgataaacgatgcaaaaacaaaaaaaaaggacgttctacaatccgggtcacttttaccgtactcgggcaacggtgctttatagactcatcgcttaaggcgggatgtatttgcaagtcagcaaagacgacagtttcttcgccgagagaaccagcggctgcatcacgaggctggcatctgattccctgtgcctatttcactcttcatttatacatatccagacctcatgtgatacgaggatcatcttacggggaaaaacccttctcttatccagtcattgggtcccgtatcccttgagaattcctcactatcccccgagctggagcagaacaattccaaaccggatacgctacataccagccacacagggtgacgtttaccatggccgaagactcggtcgcgatccttatagtcgaagatgacaacgacgcatatccgtcgttcggcaccctacccgcctcgcacgctcagtacggctttcgaatactgcgcggcatatttttaattacgctcgtcatctggaccgtagtgtggctcaagctgcttcgagacgctcttttataaaacacgcagaaaatctgtgtgttatgtgataacatgttggtatgaatgtatactttccctgaattacgttatcataaactgtaccgtccaggggtacgctatgtgtcacgcgtgttctcatgcagcgcactgtatgccaatacacgggggtaacgagggaaattccactcgcagatctgctttgtctggagacggagtaaaaacacaacgacgtttaaagtaaatacaaatgaggcacataatgcaaataaagatgatacatagcagtattctattgcgatccttcatgacggagtggaaaagcggggccttacagtttttgagaactgcacggagtaatcaaattttatcttggagaaattagcgtcgatactttataatcacgctatgcgatttacgttgtttctagttcgtagtttgtgtctcagagttgccgggacgttaaagtggatcagaacgtagatcataattaccgtcaccacggcgactgcccaaccagcgtgagtggatacgtgggaatttgtttgtttagaatgacgtgaagacaccacggtgataatatgcttggtgctatttatggtgtagttacagttatcaaaataattgagtatttcatattcgttattagtagtaatgttacacgaaaggtcacattcgtaaacgtgttcagtataagcgcctgaatcgtttaatgttacattatataactgcagacctttagtttcgtttatgcagatgaattgcggggaacacgatgtgtttgtgtagtaatgtgtaacattgcgtagatatccgttccatccacaaagttcgcaattaccgtggtaccaaaagctggaataattacagggattattgctagcgtctaggtagactgtgtctccctgcgttactgtaatgggtgcttctacatgttgactttgcagaaaaagtcgccagtaaaacgcctttttttgttcatgtaaaagtatcggcactagagtaccaattaggatgattgcaaccggtattagtgcgactggcaataacaatttagtgttgcattgcatgcccatgtttttttgtttagtaacgactgaatataacgctttatatcataggttgttaacaaaaaaaaacggagacatgttattggttaaaaaaagtttattgatcagcatgttaagccttagtccaaaattcatctggatcatatttgggaagtttggtgtaatgcggctttttgggaatgcgatggctacccatgtacaacgctataagcgccactgataccactacgcctgcccatacagcatgaattcccaggggaatgttagctttctcaatggtttctatgatgctacttccaatggtgttttcagtgttcgtagattctttatatcttacagggcatgtgccaagagtgaataacgttgtgtctccaattaacaccgttacgtagtaattttcttcttgaccgttatcacggtgacgcctggtatattttccagcgttttttgtggttaagttgtagatagttagggaggtgtcgttgcagtcaaaacatatgtcgtgccgtggtgtggtttggtgatagttgcctaattcgcacattttatgcgtggggtactcataatgaatccagtctacattgtgccatttctcagtctgattgcatttttttagagttatgttgctaccaacgtatcctgttacgttgattacctcgtaactgcgatcgcatcttttatggactgtataattgaaaccatcacaagtaacggtccacgtaaccgtaaatcgccagtccattgcaatattagttttcgctcaatgggcattaatattcctttgaacgctgagtcttacagaatgttttagtttattgttcagcttcataagatgtctgcccggaaacgtagctcaatcttcatgttctgggtgatatcgaacaatgaattctgattcactgacggtgtcttgtaacatatgatactttttgttaaaggctcgtcgtgcaaaaaacagaactatgcaggccatacaaaccaacacgatggtccatacggtgcggcttctttgcgagctatgatagagattacgtttgtggtgatgtgtattgttagtatgttgacttcctttctctctatcttcattttcgatatcggtgttgtatctagggcaaacgaaagtagcattaatagcttcagtatgattttttggtgttactaataggtagaaattttcatcttcgtgatgtcctgtgaagtaattttctttaaaacaacgtctgctgtacctgccggaattggtgatatttagatcgtacagatgtaattctgtgttgttgcacgaacgacataagtcatggtacagtgaaggtctttcatgttgagaatgacatacagtgtgagaggtaaggatgcgtagccaataccaagattgggtatgtgcgttcttacgataacctagatgatgtccgtgtgtggatctattgtaatgtcgtatccaggcgactgaaagacagtcccacgtagaattaccctttatggtgacattactcccttctattcctgttgtattggtttccttgaaacgtatgattgttgtctctgtgtgacaagcgttggaagagttagtaaggttgtacgtggtgtatgttgtggcgctgcaatttgtaggccatggtgtgcttataagtgcattattagtggatacgttgtgcgaagtttcatctgacgtgacagttacggtgattgttgtgttataagatgatgtagcgtttgctgttacgttggtaaaagatgagatagtgttggtatttgttgaaatcaattctgtagtgacagccgtattagatatattggcaaatgatgtattgaatgtagaatatacggttgtgaaagtactcaagtcggaggtaacgttggtgatgttgccaatggttgacgcttgtgaggtgacagatgtgtgtggcgtcgttgatgtgttgttattcggagttgaatatatgttggttacaaaagtggtagaggcagtgttggatagcgtaatggatgcagtactgttagcagtactgttgcatgtaactttatgcaacatacaaaatactataattgtatacactgtttgcctgtatgtaaagttatcgcatcttcgacaggtgttacgcatcttttattccaaattcccgtccaccgtcaacaacaaaggttccgtatccaggtccgtccgcagatgttcaacgtcctgttctccgattcgttgcgatcgcagaaagcagatgaccagtgcgccaacaaagatcatcagtcccgaaacccaggcgcaatggagtgagaggccggaccactggcgttttaaatccgagataattgctcggtctgcctcttgggaatccgtgaccacaccgactctgcctggtcccggataaaagcatcgacgcgtttccaaggctcggcagaagctgcgtgggtggatgatgaggtagaaagcttcgacatcgccggtatactgatcctgtagaaggtagactcccgtatctttaaccgtaagattgtacagcgtgagattttggcgcgtgcacgtgaaagttgcgccaccctgacgcgtggtttctttataggcgtctgtaatgatgcaaagtggcggcatacgacgcatgtatctgctgtagatatcataacgttgccagactacgctgtgatggctagtgttaagcctggtaaccagcgtgcgtgtacggttttcgcaagtggcgcggtagttggcgagctttaggggttttttgattggttcgacggcattcgataaacttccctgagctgtgaataaaaacagcgacgtgactatgacaagcgtgagggagttgctgtaggtctgcatggtgcaaaacacgttctcgtcttcctcgttaaacgtcgtcgtcctcgtcctcttcgtcgtctgtgcccgtcggttcgatcaacggggagttatctttctgtctggagggtcggtatggaatccgttcgtagatgttctgctttttagccgcgtgttgttccagctttttgcgtgtcaggctccgataggccagacattgatctacctcggtgcccgtgttgtttttctcctcctcgcgcgcgtaaattacgaagaagaccaccagcaggactatcagcgtggccacgaacgagcccgcgccccaggccgagtatgcgcctagcatggtaatgggttctgtgacccggcatttgcacatcgcgtggcacttgctgccattggtagatgtactattcggattgcacttacatgctaggtgggtattttctgttttcacgagacagttggtggcgaccatggtttcagcgcagacggtcacgtagcttatcaagccgagtgctaaaaagcacaccgcgtgcattacacgcggatacatattaaaacaccgtgttccacaagcaccgcacacgtcgatcctccccgcacggtcttcagcccgcccatgacatgatctccctcacgttacccttcaacaccctgtagtactctgtctcggcttccggtccccatgtcctaatcataacaaaacaccgtggcactgtccatctccctgtctttttgcgccgccggtcccccccccaaatcatgtctctagatgccgccggccaccaaccggaggcacggcggctattggattctgcattggtgcgccgcgtcttggcctgcatgatcatcgtcatcatgattgccattagcatctggatcctgacctacgtgctgtttctctaataagaaccccggcccctgacggtaattttcctttcttctccgtttctcctcagctgccgtacgtgatgcctcacggtcatctccgacaggccctctccccgacctcctggacatgtgagggcttgttgctcctcctgggattgctggtgctcttctttcaccaccacaaccagtcggccgtagaaaggcgtcgccgcgtctcgttcatcgaggctgatcgactgccgcatgagagcgggtggtattcttccgatgatgacggagaccaagacggcgatgaggaaactggagagagccacaacagaaacagcgtgggactgtccgctgtttttagctgagactggcgtgcgacctgtaaaccgttactcgggtctcaagatggtttggaagttgtgattcatcttcctgtgggtgatacccaaccggacgcgagtgttccataaaagccgggcgctccggcgagaccatgccatcctcgccttcggacgccccgctcctcttctctctcctctcctccccgctgccgcggccaccgccgccgccgcccataccatcggcatgtcggccgacaaatcgcagctgtcgtcgccgccgcagctgtagcagttaacgccgccggcctccaggaggagatggcgctctgcgtcgtctcttcgtcccgtctccccctgtggtcgtgggtggtgcgagagtacacgatgggtggctctcgcctcggggggaccacagggggagggggtaatttattattcgtatcactgtaattttgtatcgcttaatttgtttagagccgcacgcttgacaacgccttgtatagccttatttatcccgatgacttttttctccgtacaagaaatggacgtcacttgagcagacacagtttcatcgaccacgacagtctcatgatctgactacctctgacccgccaacgagaaaaccgaaaagtaaaagatgaccgcgccctcggagtccttttttccttttcaatcatgaaaacaagaggcagccgagagaatgccagtaagagacgaccatcgcagacacagtacgatactcatcttagaacgaaccagcgaataaccatcacacgtacagcagaatctcatgaactagtcaaccaacgtcataatcttcacacaatcgtttttgcgaacttttaggaaccagcaagtcaacaaaagactaacaaagaaaaaccatcttggaattaaaaaaagtagcatcgttaccttatgaaccagcagcattcagtatatacaccagatataatatatttattaatgtatcctctctttctcctgatgtaattttgtttttgtaaattcaattgttgaaagtctctccctgggggaattgcatatcttattgatgaagaagaaatccctgccatatgtgttgtcaaactatcattatttctctatatgggtattttttttctaagaagcaaaagactagcagcagccaaaataaacctgatgaaatctttaactgaactcccggtggtctgtgtgtatatttctgttggtggtcggttgtctgaacccgggtgggttgttcggaaacggcgggacggggaaacgggtggaaacagcgtcgctatatacgtgacttttgatctaaacggacgtcgctaggctgacagtttacgaattgctaaacaagatggtcaggaacaaaacaagcggggctttgcctggtaggatttcctgtggaaacaataaccggatgtgattgtggctggtacataagctggttctggctgcaagcgcttttcactgcattaggtttggcgtttgcttttgcctgggaacgctatggctataacgggaaagaaccggtttggcaacattccattgtggggggggggtacttatagcgtgcctagctatgacgttgatatatgtggatgcggataatactcgtaatgagctaaaagcgacgactggtagtaatttgaccattacgcatgggaaagatccgttgacaactaagtggaaaaccgtttttggtaacaatggtgatcagtggttgtgcaacgttacgggtataggtaatgctactgtgaatagtaacgcaactatttgtgtgtcgagctgtggtcataatacgttggatttatgtaatttaaagtcgggagattctggcttcttcgatctgtctcgttggttcggtgaaaacatggatgaatacagtggtgatgtgtggcacttggaagtcagctaaatgttgtatcgcttagtgaattggtgttcttacagttttcatgtaataaactacgtgtaattcgttaaatttgtgtgtttgtttgttagtattctgcgtaacggtggaataaaattgcgttgacctagttagatttcctgtgtagaacaatgaccggacgtgcttggactggtacatacgcaggggctggacgtggttaccggtcactggactcggtttcgctgtagctgtggttcaacctgaacatggctcccagagctgctaggaaccggtccagtcacattttttggtgggtgggggggtactaaaaaagtgtttaatattggggtttaatgataaaatccaggttatggatatggggaaactgaatacctcgcagggtcgaaatcttaccatagttgatgatagaagacggttttccatcgggtgggaaagatgggatgacggtggatggtctctatgcaatgtgactagtaatggtacaacggtcgtcaatacaacagcccgtgtttcaagttgtttgcatacgtcgctagtagtttgcagtgtgacacagcagactgattcgttgtacggagtgggtcatcggttgaatgacgaagaagatggtgaactgtggagagtttcggtttcttaataatcccatacgacatgtgttcatttatatctgaattttaggatgatgactatagtataactctggggaacaaatatcatacgttaatcactttaagttacgccgttaggaaaagaaaatcagtccgaatgaagcatagtcagccgaatgatacagcaatagcttgtttacaacgtgttcttttttacattatgaacgtgccttgctttttatacacacatggagacagaggtccctcagcccttgtcacgacaactccctttttctaaaccgtatgtgctccaaaccgcatctcctcatcgtcacgtgaaataccatgggaccccttttcgtcacacacgtctttccgcttactcaacgcgtcagcccgcgctcggcagagctaccatataaaaacgcaggggtttagcggcttccccagatcgctgctgccccggcgttctccagaagccccggcgggcgaatcggccggctggtcggtcggcgctcggacggatggggagaacggcggtgacttagccgcccgtggccgggagaagacgggggagccgagatgacaacagcagtcgtggaagggtcgccaagccccggtccttctcttctgtctggtcgaatctcgttttcttttttcaaccgctctttttgtcacctttttatgtgagtttctcttccgcgtctcccggccgtaccatccacccatgcagcatgcacgcgtgtatgtatgcatcgcctctcctccgtcccgactaccatcagcagtaccactgccgccacccccagcgccaccaccgctgccgtcgccaccgcgttatccattcctcgtaggctggtcctggggaacgggtcggcggccggtcggcttctgttttattattttttttttattttttatcttctcctttccttaatctcggattatcatttccctctcctacctaccacgaatcgcagatgataaacaagagggtaaaaagaaaaaagctacagacatttgggtacctcagctttccgataactcgaagaattcaaagtcgacgattcccaacaagagaaaacagaacaaaaacaaggtcatttttatttatcctcatcgtcaacaacaactaccgacaacaacgaaacaccaccaagaatgtcaatccgcaagggtgttcctgccccctcgacgcgcctgtcgcgatcctcatggcgaggaccgcgatctccgtataggtagatgaaattatcccgtgtccggtcctgattccccgcatgccctgcacatcctgacgcgtcggtcagcagccaaacaatcataggaaatgaaccagaagaacaaaaagatcatctctctcggtgtatagcaacaccaacaacaaccgcatcgcaacatcttcatccgcaagacggaaagaaaacaacaataatgagaatgaaatcaccacaaccaagccagatttcacgtccatgagtttttattatattattatcaaaacgaaaaacagaaaaactgtcatagataaatataaaaaaaatagaaaccacaaacgactactagtactccaatcttagatgtatatgctcctagataagatttagtattaccataatcatcgaagaatgaaagacgacgatgattccttaccgctcctgccacccggtctgtatgtagagagagaagagagaaaacggtgaatccaagatccccgggtcggcgtcggcatgccgctgatcgcagtggccccacctcggcatgccggcgccgggcgaggaattgctcatgaaaaaagtatctttctgtaaaaaaagaaaacaatacatgattaaccgaaaagaaaccaacaaaaagaacccgagatcagtcgatttcgatcactacgataaacacatggaagatttcttgaaaaaagaaaagagaaagagaccaccttcccggcggcggacacgctcctctccgtcgccgttctgcaccatgattcgatcaataacaacatcatcatcggagaccatcttttaatcaatcagcgttgcagtagtcgactccctggacacgaaggagtcatccatttttatcctcgcacttcttcgctctcaaagccgcctttaaagttgaaatgaaaggatggaaacatggaatacagttttaattgcacgtatcaccattttactacaaaaagaaaaaaaaacaacttacacatagtattaccttaggtttacggataagtagagtgtaggcgtttttgaaacagttcagccaatgcaatcttgtctcggcataatcactctttctgcatataatagtagtagtagatttattcacatcaacacagcgaaaaactccagcatcaaagtacacctagagacagcccttaaaatatagtttgcagcttttagatgtacttacaccaaagaagattaccgtccttacgagaaaacagatactcggatataggaatcaagacagctctgcactgaaaacacactctcctgtcacgacaccgcgccacaccagaggcgtacgcgtgacttcatcgcaacgatccatcgtgatgtccctcgcagaacctaaaaagaccaaaaaaaaatcttggaccacagttgtcgattcttgaagacaatattctcgtgagaactttgagattcgcacttgaaacctcttaggatccacaaaaacaacaacctctgtatggaaaatgcgctattttatctcagcttttctcccaaacctcggtttcttcctattcttaagttttccctagtatatttgcctccttataagaaaagaagcacaagctcggtcgcacggattattccttctgctaatctattattttgttccttttttttttctttgccttcacccccttcactccctgtagcaacacagagtagtagacacaataaatgagaagtttgcatgcatttgccgtgtccgtggtctgttatagcgtgtggagtgctcgggatggatggacgtggggacggattcctgaggctacaaagatacgcggagacgtcgtggcgaggggatgggtttattggatatcggtgaagcagcgtggcggcgaaatacgcgatccctgggctggtagatccccctaccccgtctaccagggacgtttatccttgggacatgtaaatgtctcggccggcatccacgcgccacgttcaccgcgtcgtgcccagcgccatgtgcgggtcgtttcggcgtgaagttggacggcgtagtttcggggattgtgaaccgtggctgagggtgtagaagggataggaaagagcgtgtgatgtgggcgagtcgtagcatgtgggtgcgatgcggtggatatggtgggctggggtggttttgggcgtggagatgtggagatgggggtgatccggatgcgtggcaataggcctcgagcttgggcttctcccgcggatggacgttctaactgtacacggcggccgtggcctccgagtaaaaaaaccaagtgctgacgccagacagagacgccgtcctcggaatcgtgtgcgcgaaagcctgtgccgcggcagcgtacgacgttccagtcagcgaggccgtcgcgttggcgcgccaacagtaaggtcacgataggttggcggcccatggttccgaagcgtccccacatgcaccagcagtcggcgtcgaagtcgctcgcgctgtcggcccagtcgccaccgccgcggcggatttccgcgcgggggacggggtagccgagcgctgcgccttcgccaatgttgtgaagtagatgcgtgagttgatgttgattttctgtggaaaaatgagcgctttcctgagggttggcgttggggtatgcgtgtagttggggttgtgtttgagcgtagaggtgttggcgggcctgcgcgcaagcagcgtaatccgcggcgtcgagctccatctgcgtgcggtgttcttcgttggcgtgtttgtccgaggtttggataggcggttgtgtgttgctgtggtgtaagggtaacgtgtgttggtactctgggtgaagcggcgtggtgtgggtgctgtttgtgtctgtggctggcatgattgtgcggcatgtgtgtgttgaagtgggtggaggttaaataggcgagggtgagtccccgtccccgccgcaaaaggcccccgtcctcgccgcaaacacccccgccacccccgtccctcagcccgggtccgcgagtccccgttcccagcgtaatccccgtacccgcaacgccccggccccaccgccgtcccgcacaccccccgtcccccagcccggtgcccagcgtgcgaaaaaagctccgtccctcacacccgcagaaagatccctcagcgcggtgaaaccccgtccccagcgccgtgccgctgacaaagaccatgggacgacacgcacaggcagcgcgcacaaagcgctggtcgaaacacgccgcaaacgccgccccgcgctgacgcaccgcaaacctcccttagtccggtctcgcgaacaaatagcgtgggacgccacgcaccggtagtgtgtacaaagggaggcgtgctcacggcccgcaaacctccgtgagccctgtcccgcaccggcgccgttcggggtgtgtcgggggcgcggctgggtgggtgggtgtgtgccgggtgtgtcgcgggcgtgtgtcgggtgtgtcgggggtgtgttggcggggcgggtgcggctgggtgtgttggcggggtgtgtcagggtgtgtcggtcgggtgtgtcgcgggcgtgtgtcgggcgtgtggcgggtgtgtcgcgggtgtgtcaggggtgtgtcggcggtgtgcgcggcttcggggtgcgtgtcggcggccggagggaacaacaagtgtgccccggggcccgcgagtcccccccccccccctcccctgggcggccgcttctgcgtgtgtcctcgacgcgggttgcggcgtacttcgtctgttcctgcccccgcggtcccctaggcgcttcctcttttccgcccgtccccctggggacttcctcttttccgcgtcgtttccgcgtccctggccgtcgtcgtccccccctgggactcgctcgtcgtgtgtcccctgggactcgcttttccgcgtgtgttccgccgcggtcaaagacacacaacacagacgcgcgtctgcttttcgccgtgcgcgccgcacgccgcttttattcgccgccgccgtcccaaccgcaccgcagcacactcttaccaccgtcaccgtcctccacagcacacgcggctccaagactccaaatttcacccccccgctaaaaacacccccccgcccctcggggacccagcacacggcccggaatggatgtcggccgtccacctaggtgggtgcgcgctcgggaggcggctttgctttgcactccggggctgtcgcgcgtgttccttcgggtggctgggctgccgggtggttttccacggccttttagactgcgcggcgccaaggcggcgctagcaagcgccgtgcacgccgctgcctataaaagccaggtgcgtggcgaccgtagcacacggacaacggagacgtccccgtgtgtaaacggcgtggtcgcggacgcgggttgtgttgctatatagtggacgtcggctcgacgtcggaggtgtccggcggccatggcccagcgcaacggcatgtcgccgcgccccccgcccctcggtcgcggccgcggtgccggagggccttcgggggttggttcctccccttcttcttcttgtgtgccgatggcagcgacgtcaacagcggggactggtgcgagtactgcgggttcggcgacgccggcccacggcgtccaccgcgtagaaccccgcgggccgccgggcgcccctccgggtagcggcaacaacagcaacttttggcacggcccggagcgcctgttgctgtctcagattcctgtggagcgccaggcgctgacggagctggaataccaggccatgggcgccgtgtggcgcgcggcgtttctggccaacagcacgggccgcgccatgcgcaagtggtcgcagcgcgacgcgggcacactgctgccgctcggacggccgtacggattctacgcgcgggtgacgccgcgcagccagatgaacggcgtgggcgcgacggacctgcgtcaattgtcgccgcgtgacgcgtggatcgtgttggtggcgaccgtggtgcacgaggtggaccccgcggccgacccgacggtgggcgacaaggccggccatcccgagggtctgtgcgcgcaggacggactgtacctggcgctgggcgccgggttccgcgtgttcgtgtacgacctggcgaacaacacgctgatcctggcggcgcgcgacgcggacgagtggtttcggcacggcgcgggcgaggtggtgcggctgtaccgctgcaaccggctgggcgtggggacaccgcgcgcgacgctgctgcctcagccggcgctccgacagacgttgctgcgcgccgaggaggcgacggcgctcggacgggagctgcgccggcggtgggcaggcacgacggtggcactacagacgccgggaaggcgactgcagccgatggtgctgctgggcgcgtggcaggagctggcgcagtacgaaccgttcgcgtcggccccgcaccccgcgtcgctgctgacggccgtgcgtcggcacctgaaccaacggttgtgctgcggctggctggcgctgggcgcggtgctgcccgcgcggtggctgggctgcgcggcggggccggcggggccggcgacagggacggcggcggggacgacgacgatgacggcggggacgacgttgccggcgggggcgagcggcacggagacggaggccgccggcggggacgcgccgtgcgcgatggcgggagccgtggggtccgctgtacctgtgcctccgcagccatacggcgcctccgccggcgggaacgcggtgtgcgtgccaaacgcggacgcgcacgcggtggtcggggcggatgcggcggcagcagtggcggcgccgacggtgttggtgggtccgacggcgatggcgggtccggcggcgtcagggaccgtgccgcgcgccatgctggtggtggtgctggacgagctgggcgccgtgttcgggtactgcccgctggacgggcacgtgtacccgctggcggcggagctgtcgcactttctgcgcgcgggcgtgctgggcgcgctggcgctggggcgcgagtcggcgcccgccgccgaggccgcgcggcggctgctgcccgagctggaccgcgagcagtgggagcggccgcgctgggacgcgctgcacctgcacccgcgcgccgcgctgtgggcgcgcgagccgcacgggcagtgggagttcatgtttcgcgaacaacgcggtgaccccataaatgatcccgtcgcatttcgtgtttcggacgctcgaactctcggtctcgacctcaccaccgtcatgacagagcgtcaaagtcaattgcccgaaaagtatatcggtttctatcagattaggaaacctccttggctcatggaacaacctccacccccatctcgccaaaccaaaccggacgctgcaacgatgcccccaccgctcagtgctcaggcaagcgtcagctatgcgctccgatacgatgacgagtcctggcgcccgctcagcacagttgacgaccacaaagcctggttggatctcgacgaatcacattgggtcctcggggacagccgacccgacgatataaaacaacgcagactgctgaaggccactcaacgacgaggcgccgaaatcgacagaccgatgcctgtcgtgcccgaagaatgttacgaccaacggttcactaccgaaggccaccaggtcatcccgttgtgcgcgtccgaacccgaggatgacgacgaagatcctacctacgacgaattgccgtcgcgcccaccccagaaacataagccgccagacaaacctccgcgcttatgcaaaacgggccccggcccacctccgctgccgccaaagcaacggcacggttccaccgacggaaaagtttctgcgccccgacagtcggagcatcataaaagacagacccgaccgccaaggccgccaccgcccaaattcggggatagaaccgcggcccatctctcacaaaatatgcgagacatgtacctcgatatgtgtacatcttcgggccacaggccacggccgccagcacctccgcggccgaaaaaatgtcaaacacacgcccctcaccacgttcatcattgaaagtctctccagtccatatgttgtcaggacgtactgtcgttctccgcttgctgcgaagcccgttcttccgagtcgtgtcgctgcgtccagcgtcgcgcccaagatgggaatttgggtctcttcacgcgtagcctcctccaccacggctgctgatcgccgtcactaaggaccgacacggaggatgacgaggagcttctccccgactccgcggtccgcgaccggctacgtagcgcgtgtccctgccagtctccgcagttacaccatacgtcgtgagcagcgtgcacctgctgccgccactgggcctcggcgtgctcaggccacccgccggagcccggtctgagctccgacgcaggatgcgcgtactcaacgtgcgccttccagtccatacagcaacaccataggtcgtgcgagtcgtcggctacccgccgccaggccagttcccgcatgggaaggctggacacgccaaccgagaggtcaccgagcccggacgccatttcttcttcctctccgtcgctgtcatcaagcagccaggtcacctcctccgctccgcggtccgccggtctcgacggaccgcgccgccgtcggcaacacggaaaacagcacgccagcccgagccgctaaggccgcatgcccctgccgcccaactgaacacgcataccccgctcaactgcgttttgccacccctgccagtgctctcgctcgagcaccaccccgcatctcccaacc

SEQ ID NO: 7 - DNA, 234881 bp, Human cytomegalovirus
gaagctaggcgcgcctgtttaaacatggatccagacatgataagatacattgatgagtttggacaaaccacaactagaatgcagtgaaaaaaatgctttatttgtgaaatttgtgatgctattgctttatttgtaaccattataagctgcaataaacaagttaacgtcgacccgggtacctctagatccgctagcgctttagcgaccggagattggcgggacgaatacgacgcccatatcccacggctgttcaatccaggtatcttgcgggatatcaacaacatagtcatcaaccagcggacgaccagccggttttgcgaagatggtgacaaagtgcgcttttggatacatttcacgaatcgcaaccgcagtaccaccggtatccaccaggtcatcaataacgatgaagccttcgccatcgccttctgcgcgtttcagcactttaagctcgcgctggttgtcgtgatcgtagctggaaatacaaacggtatcgacatgacgaatacccagttcacgcgccagtaacgcacccggtaccagaccgccacggcttacggcaataatgcctttccattgttcagaaggcatcagtcggcttgcgagtttacgtgcatggatctgcaacatgtcccaggtgacgatgtatttttcgctcatggcctgcagctgtgttcgaggccgcgcgtgtcaccttaatatgcgaagtggacctgggaccgcgccgccccgactgcatctgcgtgttcgagttcgccaatgacaagacgctgggcggggagatccataacttcgtataatgtatgctatacgaagttatctaggaagctgatgcggccggcccttaattaatctttttcgccgcctgcaagcattggtgcgcaaagtcctcacccagctgtttccagctatcatctgcatctgtgcagtcccctgtatcgttgtaacaaacgggtctgtgcgactttgttctcggaacataagcttgttgtcgcggtgacagagagagaagggttttcgggtcacgcgaagaccgctcaccgggggtcggcaacgcacacatcaacagaaaaccgagacggatcaagaggtccatagtgaagaaggagcgatatcgacgtacttacgaaacggcgattatatatgttctcaacaataccgccctacgttgtatgatgtaacgtgtgacgtgagtctgatccaacactgaacgctttcgtcgtgtttttcatgcaacttttacggaccatgacaagcctgacgagagcgttcatcggggcatgaagtacgcattacataaactctatatatttgttacgatagaatacggaacggaggaggctttcgccacacctatcctgaaagcgttgcattctttatgataggtgtgacgatgtctttaccattcccacggctgctttgcgtgacgatgacattcatcatgtatttccattcacacataccttttgtgcatacggtttatatatgatcatccacgcttataacaagcctaacagtttattagcccttgacaggataggtcaaaagattatatgtaggttttccggtaaaccgaattgtgatgtttctctgcaggaaataaaacagcctggtacctatgaaacggacaatgcagtactgtagcagcgtaaccaagtaggtccacatgaacacgtacaaaattatggtaagccatcgtttttcgtgccacagcctgtagctgtcgtacatgaatgaggacggtctagggatccagggtacttgtaattgggggcgacattcgtaccgtccagaagacagtcgcacgggtttcagtgagatgagcactttaacgatgtccgcggtgacgctacgttttaccgtgacggtgagaatttgaccgtcgttttgtacttcatgaggcacgttatacaagccactggtatcatgaaggatgacctctgatgcgatgtgaggattaaattgtccctcaaaccgccaaacgctggtcatgttaccaccgtcaattacgcagctgacggtgtgaaatactacgatgttggacttaggtttgggggctaattgccttttcacaaattttattctgtattgcaggtcctgctgccactgcttttccgtgcggaaagtcggcacgtcttccgcacgtttagcgacgatagacgccaccaaggtagataccagaagcagctggatccgcatggtattaccgtatgtcaattagaaagttgaacggacacggttatcgttcctggcggatataagtatataaacgcgagttagcctttcccgtccgttttgtacacccgttccccacacaaatgacgaatacggcctttttttttataaaaataaaccacgtgtattatataaaaacatttacatagaaaagagacacacggatcaacataaggacttttcacacttttggggtacacaggcgtgccaccgcagataataagcgctggatacacggtacacagtcctggccagcacgtatcccaacagcagcaccatcgccatctgtatggcgatcacgaccccgagctctaagtgtctgtattcatagtgtagtcgtcgcaggttatccactgaattcccgtagctgaaataacgtatatggtaccgaggctggcaccacatgggtttgcatttggagcacggcaccaaatgcagagtgagatggtccaagtccgtgggcacccactggcgcaaacggaatacggcttcggtggtctccacgaggcactccggggcttgcagacggccccactttcgtccgtgacggcccgaccagccgacccgagccactatccctttctcgggatagaacgtaccctgtacacgccatacagcgtccaacacgccgtctttgacgacgcagctggcctgatagctggacacgttgttaagcggcggaaagcgaaactgacgtgccggcggagccacatagttcggttcaccgtgttgtcgcggttcgtcctccctatagtaatagtagtcgtcgtcctcataggggttgccggcgtgagccagcgttacccaacagcagcccaggccgacgaggaggcgcagccaccgcctcatggcggcttcgccagtcaatcgtctttagcctcttcttcccgtgaggtccttccggtggcgcggtgccgacctcggacccagggacgtatccacctcaggtacacacagtaggctacctggacaccgaagctgaacaaggctacatgtttcacaaactgcaccagtaccacatagaggaatgtcaggtagcgtctctccgcaaacagccgttccaagtctgagggcgttacccgcagcggcaaccagggcagcctggacgccggccggcaatggagcacgctccggttacaggcactgcaggggtaaacggttaacatcacgtaagagagtcgtgcgtccacctgtgggagctcagtttcgtaacgtagagccccgtcattttccagctggggtgcgccgaccttgaaatgggtcgcgctccgttcgttaccccaggtgccgtaggctctcggggccgtatcggagaagttgccgtgcacaagccaggcggccacgagtaccccgtgctggacgtaacattcggacacggaactggagacacggtagccggacacgtccccaaacccgcgagggtactggggcagacggacggacttgctatttgacaacggacagatacgagacgacgaggacgcagacgactcgtcgctggaccacgacaaccggagcgactccttggagcggctcgagagtacacttactgcgatcagacaccagtgccagaagaaggaacaggtggacggggaccacaggatcatagccgccggcaccgcggccggccgcaggaagccgcccggcgcgtcgtctgtgtgcgggagccgaaacaccgtgcctctttatatcgtcccgacgtgacgcgagtattacgtgtcaggggaaaaccccgtcatgacgaacgtgattcgtaagtgacgcggggtgctgacggggttcggctcgagaagtgacggagcgcctcacgtcagtatgatgtccgatccgcgtcagccccgacgtggttatggtcaccgaaacccacgtttatatggacgttgagaacagcgcctgaccacatgattcatcataccatttctcggaatcgggcccatgccgggaaagcacattccttttcagtaaacaacaatgacatcataacaaatcattttattcgcgaggtggataataaccgcatatcaggaggagggatcgggtgatgacgcaggccccgcaaaacagtccgaaataaatttttagtatcgccccgtagtcgcctagataccagaggtacgtcaagttcatcaaaacgcccatcggcgtcccggaatcgtataccgggcacacgaagcgttcataacaatcccgggaggcgagtgttagggtagcagaatagtttcggggtcggtttccttccggcgacgacagctccgtgggcagcagaatgtagagcgcctcggtagccgtcgcggtgccttccacgaggatgggctgccggtgcctttcgtgattttctccgtcgtgtagccaagccgaggcccgcaaagtcttaggcgaggggaattgtccatagactttcaccgcacccttcagtacatggttctgaataacacagccgcacgtgaagtaggtcggttctctcgtctcctccgtggctgccgccaccactcccagccaccacaacaggcaggtcgcgagagggttccggaggcttccccggcgtagcatggtttcgggttaaagcaaaaagtctggtgagtcgtttccgagcgactcgagatgcactccgcttcagtctatatatcaccactggtccgaaaacatccagggaaaatgtcggtgcagccaacctttcacatacagcccccaaaacacttgaatcactgccaccatcatcagcgtatactgcgccgacttaatcgtgagcgcgtagtacgccattagacggcgatcttcgaacaatagtcgttcgatgtcctctaacgagctccacagaggaacccaaggcacgaggcaccggggttcgcactctacataataagtttggcattggtggcagggggaaaagtagaacaacacgagttttgtgcgttggggaacacgatagtcccggagccagtagcgttttgcgacgaggctttcggagacgtcctccaccggcgtcggcactcgatccgcgtagccctccagcgtctggtagtacacccggggtgtcggcgtgggcacggacaggttcccgcgcagggtccacagagcctccagtcgaccgcccgatcggagcacgcagcgcgcctcggaatactctactcggtactccgaaacatcgggcagaggcggtaacggctccgtctccaccaagggcggaggttcatcgaaaagagtcaaggataattcaggcatactacctgcgaccggggcccagagggctaggataagcattacaagattcattctgtcttacaagggaaggctgttcccctgtctagactcaaaagctgtaaggctgtcttatagcatgtagtcttgcacgtcacggggaacagggtggtgatctagtgacgtcgggagaacacggtgttttagggtgcgggggacaaaggacagtacgacagattaggtgatagaaacgtttttttttatttatgaaaaagccagtgtgccgtgcggcctagggccccggcgtagtttggataccagatgggggccgtcaggggtactaccacgagcagaaacataataacttggtccatgtatagcagcatagcggtgcgtagcaggtcgccgtccgtgtagcaatttgacggtgagcgataaagcaccgttaatgtgtcgcggataagcacgatcttgaggccgtagatgaagctcacagtcagtgctaaaatgatgcgttggtatggttcccaggactgcacggcgatgaagagccagagtatgggaagcatgaagcttagcaaacagaggatggctaaccgtcgttgcatgttccaggccatgagccaggctaggcccgtacaccagacgcagagcatggatgacaggacataggcctggattaccacggtgcgatcgaaacacagcccgatggtggacacggatatcgtagtgagggtggtatataccatgaccagcatcagggtcccgggtaggcgccgacgttccagccagtacgcgtggcaacgcagagcgcagggtagcagtgtgctccagaagggcagtgtatcgcgcaggtagggggtcgtcacgcgccacggtatgagcatgaaaaggatggtagtggctatggtggcgctggtctggaacacgacggtgccgtagagacgtaccatccagagaaagtgttgaacgctccgcagggtgtcttcatctttggtgattacggtgactcgacggatcggcggtggtgacggcggcgacacgggtgggggtttctctttcttatggccgagtggctcgccttggtgaaactggatctgtaccatgacgggtgctcgacgaacagtcgtcggggctttaggtacccggcaagttttatagagaaagggggacgatgggtggtggctacgagccaccgccaccttcgcaatacgaggatctgaaggcggcaaagacggtcgtccagggcaggtgccagaggttgggactgagcacgatcagcgtgattttaaacatggtcaccagtcctacgtagatcagcagcgagccacgtaacgtctgagcagccggcagttcgtcgcggatgtaacgcgtgccgtagaaagtcacggtcatcataaggaagacgatggcgccgtagccgtagagtagaatacgctgatgatggaacacggtctggtcgccgataacccagagcgtgatgaaaaaaacgctggtgagcacccgtgtgcatatgagctcccaacgcttagcgcgaaagctgtccccaaccatgacagcgccggtgcaagctatccacagcgtgaggaccagtgtgtagtcgatgaggatggcgggcaggtcggagcaccaggtgtagaaaaccgtggtaacggagaggaggcctacgtagcccatggtcaataccacgtcgtcggggtgcctttcgccctgtatcaagaccaaacaccagagaagggagggggcaaaaaccagcagcagaggggaagattcatgttgacatatgttgtgggaatcggggatgcccagccaaatcattccgcagaaagccgtactgatggcgatgtgaaagaccactagggcgtagacccggacgaggacagcaaaacggcgcagccacataaggccgtggtgcagctgcaggagagaagcccattgcggcgaatgtagcgacggcagcggcgggtccatgaggcgggtgatgcacccgagtgaacgggtgagcgtctcggtggagtcttcttataaaccagcggagctcaggcagtcttgctctggagcgtcgcagtggtggtgttgaggatgacgctgagcgtgccgttgtcaatccggtaatgatgataggtgccaagcttggccaggtagctgaacatttggtcccagcgtgccgaccacaccacgggcgtgagcatcaggagtgtggtgtgataaatgagtgtttcggtggcgtaaagtatcagcgagctgcggatgatgtggctcacgggcattttggtggcgatgtagcgcacgtcttggaaaagaacggccaggatgcagcccacgaacacggtatagagacacagcagagtcttatgcaaccaggtgtaagtagaagccaggacgctgaccatcaccgtcaaaagtgtggaggtaaaaagcgcgtcacgccacacggagctgagacggtgctcccaagccacgccgttgcaggccacgaacaacgtccacgttaagatgaggctggaaacgccaatgggcgctgtggcgcacaggttgagcccggcggtggtgaacgacagaagcgccacatacagcgcaaacaccaggccgttgctggggtgtctatgatcggtaagctccagcgcgcccagaaccaacaccggtgtgcagctaagcaataacggcgaaggatcgtcgcggcactcgtagcccagcgaggggtaacccagccaaaccagcgcgctaatgagcacgctaaaagcggtttccagcgtcagcaatccgtagacacgcatgacgatcgcggtccgccgtagccaacacaccgcatcttcggaagctgtggacgctgtttccgaataccgggaggagatcgtgcttccctcttccaaggatcggaaagtagcgtccgtcgtttccgcagacgcggcttccctggtacgctccgtttccgacgacgcggtttcccgctgcgtggaaactgtctccatgtcgggaccgcagcgcccggcggcgtatccgcaaggtctcgaagctacagcttgtcagaggaaaagtaggtttgcaaaaaggtgcgcagggtcatgattctcagcaccatcagcagagtgaaaaccaggctgagaaacaccttgacggccgccaaaagcgcgcgttccagcggcgtctcgtagcgtacagccagggccgcttcgtggaaatgcgagacggctagacaggtaatgagcacgctgaaggacaagacgatcttaaagcaccaggaccaaccacgcctcaagatgaccaccacgattgccgtgaaggtcaacgtgatcaaagcatggatgaccacgatctgacggcggacggtacgttcgggagccaacaacgctacgccggtgcagctgagaaaggccagtaaggtgaacaacgcggccgagatgaccaacgtaccgtccaggcagagacatatcacgatcaacggcggcacgtgaagcagcgtgtaaaagagcagaacgccgatattgctgggatgcgatgtttcgtaacagtgaatgaagatcaccgacgtgacgggtatgataaagacgaggctgggcgaggactccgtgagacacagacgggaatggtgaaaccacgtcgcgggcgccgcgtagcagaaggcgctcaacaacgcggtcaagccggccagctgccaacccacggcgccataggtgtgcagcgccacgcggcaacagtcgacccaagccagactgcgggtcgccagccgggtctcttggatcccggggggcacgtagatgaccgtgccatcggtgggtacctgaaaccctttttctcttctcatggtgcgctgcgttctctggaaacggctgctctgtccgaaaaccagttccgaacgaaaatctagggcgagagggtggacaacggcgtcgacgacgaagcatgggacaggtcgttcggcgttaacgtcatcgcgtcggacgacggtagttctaagagacgtagatcgctcagcaggtcctgacagttgcggattcgcaagatcagaaaaaaaagggaaatgaacgtaataaagagctgtagcgacgtatgcgctacatcgcgtggcataagaacgtgacggacgaaaaggacctgctgcgaaaagtggccggcaaagataaggcccaccgtgctgtagaagcccaaaagcagccgcaggggccaagtccagggccgcgtaaagacgatgagaacgttaaccagaaagaccacgacccagacgccgttgatgagggtaaattgatcggacagggtgcagttgtcgcgacagatgaagactacttccgcgcagagcaaggtgatgaccaatgtgagcacaaacgacgtcaacacctcgcggggctcctggcaggcacacgtgacacctagcgccgggatgtgcgccaggaggccggcgagtaatagcaccagctgtcggaacggacgacggcagcgcgggtgccggtttcgctgagcgagaaccggtcgctcataacggaaatacacgaagagcgcggaggccacaggcaccaggaggagcacctcgggcgcccagacgacgtgacaaggaaagcctggacgcgacttaagagtcgctgtagggaagaccagagagaagctacccaagacggccaccgccgcggagatttggaagaggagcaagccggcgattcggacgacaacctcgaagcgatgcacccagcccagcacggccaccacggccgcttcatcatagtcgtcgttgttgccgctgtcgaacagccgccgaaacacgatctgtcgctgggtcgcggtgggaaagcgcagacccatgacagccggaggctatatgaccgcgcgtctaaggcgcgagatccgtggggggacttttagatgtttgggcggcccgcggttctaacaggcttgattggtggagacggccggcgcggcgggtgggggaaacgacgagtttttccgttacgccatggttcgcgtgaggtttctctgtacctcccgcaaaaggtcacagcccgaaatggaggccgcgttggtggccccggtggcgcgtgacgataaccaggtcatccaagtgatgagtttgtctaatgagtcctcggtggtgaagaggataagaatgagcaggtacaagtacaccaggttctcatagagacacaaggtgagcaggtcggcctcggaccacgcgatctcaaacaggcgtgtggtgtcaaagaccgtaacgaccagcatgaagctgagcgccatggcgtaatagcccaaaaaaagtttgtgccccaacggtacgggctgcaggtaaagtgcgatcaagaacgcgataacgccgatcacaaacagcgtgacgatgacctgccatcgacggcgattatggccggctagacccgtgacgcagctgcagaggctaaaaagcacgcaagccaagaggcccgagaaggtcaccagcgtagaggaggagcaggcgctggccacgatcaccgaaagcgtcgtgagcacgctataaatggtgagcaggcccgggctcggcggcgacgtaaacgatccttcatcgcgtttgccatgcagcagggccaaacagatggtgggcaccatcaaactcaagggcggcataaagccggtgcaacagagaaagacggtgcctttaagatgcggaaaagccagcaccaggcccagacagagcaagaaggtgcaggtgccctgcacggccacggtgctgtagacccgcatacaaagtaaaaagcgacgtacgtcgttcgtcgagacggaggaaatcataatgactccgcgcgagggtcgcgggggtgggggcgcccaggccgtcccggtggcctctgagttcggagacatgacggcggtggctatcaaaaggcgcgtatgagaaaccgtttatagagtgtaatagaatcaccgtcattcccacacggcgttcccccataaagtcacgtcacactcgagtaagcgtgaaaaagctttattattgaataaaaaacacgagtacaacaccgagttgcggtgtcctgtctactgggtgggggaggtttatcgtctgtctctagagggaaggtggggaacgtctaagcgagcgggagcgtgtcatctcccccatctttttacaacaagctgaggagactcacgccgtcgatgcgtccgccgtgtttctcggcgtactgctgcacccagacgtggccgctaaagatggcgacgctcatgtttaggagactcatgacgatggtgtacaacacgacgctgacacagacgctgtttttagacagcgttccacgctggtagatgagatccagggtctcgtaaataagcacggccgaagcggcggtcaccaccaggacgtagagtccgctgtagatcttgctgacccacagcacgggcgaaaagtaaagcaataggtaaaagacgatgacggaccagccgtagccaatcccgatgactttccagcgcgtgggattgttgccggccaggtaggtgagaccgctgcagagaacgaaaaagaccatcaccagggcaaacgacagaccgatgacgcgcctttctccgcaaaagcccgtgcacacggtgatgccggtgttgatcagcaggcatgccaccgtgagatgagcaaaattggtggtgtgtgggcgaaactcggcgaaaccgcgtagcatggccagcgtggacacgggcacgatggaggacagggctggcactatgccgttggcgcactgtccctgcacatcggggaaggcgagccaagccagcaggcagaccgtgagggtacaagccagctgccacacgagcccgtgatagacctccatgagcagcttgaagcgtttcaaccactggaagagctgctgttcggccaccagcgcgtggctgcgatggagcggcacgatggtgaccgtcggcgactcatggtgttcggaaaccgaggcggtgtcgcccatgctgccgcttacgaccgctgtcggtctaaggtaggcgtcgatgaaacagtccgtcttatcagcacccggttaccgcggatttgattgacgtcacgagtgtggtcaaaccgtggcggcaccctgtatccgacccgtcgtcatgggctccacaaccagagcctcagaagatggtacatgccgatgaataaagccacattttcgacatagaggcgtagcgagggctgaaaactctccgggaaagaactctgacaggtgatcagggacagatcgtgaattagcatcagcgtcaccgtcaacagcgtcgtcgcgtgtaaaccgagaaagaacggggtcgcggcccgcagcagccaaagtcccagcgccgtagcgcagagcagagacaggaccgacggtagccacagccgccggagagacgcgccaggatcgcaacccaaaagcgaggcccccaggcagccgagatctaccgccagggcgagaagagccgcgccgagaaaggcctgcggcgacggctggcacatcagcaaggtcagaaaggctagcgcgtgcggcaggcagtaagccaacaggagtgggagtttgcggggacaacggtcgatagacggaccgcgtagcagcaggaacaggcagccgacgggcacgacgaggctgagatgagaaagcggcggtgggtcgtcgtcccgtccccgctcgcatagctcggccaccggtggcggcatgagccaccagctgagcacgctgagggcgacggtggcggtaagctggaaggcgacgaggacggaggcgcgcagccataccgccagcctctctaagtaggggactacctcctcgacggtccattctagcgggacgacatgaagcatggcgacaagcgcggctgctgtgaaaatgagcgcggttttataggcattaggacttcccgatcgtactggcggctgtcaaagtcccgttgtccaaagacgcgccgtccgaaagactaatccaacggggacccgagagcatgagcaacaacgtgagaaagatggccatgctgtccaggtagagacagacggcatgacggatgcactggttaggtgggcagaaaaagatgaccatgagactgtcgtaggccagaatacccaaaaagaagctgatggagaaggcgcacaacgtcaccactatcttctgcagccagtcggcgtcgcttagcagagcgagcgtgaggaacgaaagcagcatcaccacgtagacgcagctgatgcatttccaacgacgtcggtcacggccacctagaaacgccagccccgtaaaggagataaacaacgccagggtcatcacgtaggaacctactagtacgcggctttcagagcacatttggaagatggccgccgtcaggctgttggccaacagatagatgaaaagcaccgtggcgttactagggtgctcgttgcccaaagtgtacgtgatgaacatgcagacgatgggcacgagcacggtgagaaagaagctgtagttctcgacgcaaaagttgcggttttgtgggaaccccaaccaaaaaacgcttcccaagccgaagctgaaagccaactgaaagatgaagatggcgtacacacgcagccatacggtgaactttttgaaccactcgagagcctccatgcgggagagcagcagcgcgttagcctcctgcgcctgcatggtggcgacggtctcggcacaaagccgctgcggcgcacctacccttctcttatacacaagcgagcgagtggggcacggtgacgtggtcacgccgcggacacgtcgattaggagacgaactggggcgacgccgctgctgtggcagcgaccgtcgtagcgaccgtcgtctgagcagtgtgggcgctgccgggctcggagggcatgaagtagagcacggagacaaagaggtacatgaggtccatgtacaagcagagcgcgcccgggatataactctcatactcgatgtcgtgcaggatgtcctgcgtatcgcacaccaccgaggtcacgatgacggccaaaccggctatcatcaccaggatctcacttaccgcctcgggaaaaagagaaaatacggcgaacagtaagagaatcagcgtggatgcgcccgtcaatagggaacgctgtaattccacgtcgcgggcaaacagatacgtagcgagcgtaaggaaacaaaatagcgttactgtggccaccatggcataaatgactgaacgatgactaaaatggaagcctgacgccgtgacagccacgctggtaagcaacgtgtacgtcagtaagatccatacgtttttgggaaagttgggctcggcccaacgcaacagacctaggcacacgatggagatcattaagcaagacagcgtcagacgcacgctggaaaagagctgctccagccggtgcggcaacaccagccagcaaaaggcgcagacgctcataaggatgaggcattgcacccagataaggatgtagatgcgcagcaggaagaccgaccgggctatctggacctgaccgcggagcgacatggcggcaacgccggcggttatcgccgagattcgtctaaatacacgaagcgaactagaaaacgcacacacgttatttgcaaaaagaaagcagctgccggcttattattttattaaaaatttatctgtgcagaatcataagtttatgatgaataaaaacggggaaagggaatctgcttttagggacccgggtctggtccgtcgtctcccatctggtcgggttcggggatggggacctgtttcagcgtgtgtccgcgggcgtgcatggcttttgctcgccggccgcgctgtaaccaggcctctttctctgtggtcggcgagtcttccgacgggtagggagtctgggagtccatcgcttcaggcccaccgctcgttccctcgaccgtcgtgtcgtcctcgttttcgctattacacggggtttctggagtatcgcctatacggttggcgattctccgggggtggccgctctcgtcctcgtcgctgctatcgccgcccggtaattcgacgccgcattcgttgtacggagcgcggcacatgggcggcggaaagaacttgggcatgcgaaagcagcgttgtccatccacggtctgcgtggtttcatcattatcctcccataatcccccctgtagcgccggcagcgtttcgacgctgtgagaggggaaggcccagttctggttgtcttgcagcgcgcccgtgggcagtaggtccgtgcggccccaggcgctgctgttgttgggtaccttgtcagtgccgcgagtaggtcgcagaaaccagtccagagcgctctctagctgcgagcgtgtgatggtgcccagtgcgccgtgccagcgcagcacgtctcttttcagcgtgtggtgacagacgggcagctcctccaaccgacactcgccgcgcaatccgcggtcgaagcggcagagaccacgcaatttaagcagaccgcacttgagaaacatgtgaaaattatcggcaatgcgatacaggtctgagtcctcgatcttgtgtaggtagaccacgccaaacttgtcgagcagcaccaggccgctgggcacaaaaggcccgtaggccaggtaatagcccacgaggccgacgacgtaccactcgcagcacaagcgttgacgaataaagttcagaagatcgcgaaagtccgcggccggcatgtggtcaaaaggccggcaggcgcgcaggccctcgatggagcccagcatgagcaacggctccacctcggtgcgacccggcgtgcggatgaccaggttgagaccgctcatttcgcgggccgtcttggccacggccgcagcgtcagtggggtcggtgcagaggaatttttgcacatgatagcgcggttcggtggtggcgaacggcgtttgtgggtgccgatacacatattcgcaccagagtaggccgttcttggaaaaggctttgatatcactggccacctcgtagagcccgtcggtctcccagtcgtagacgtagacggtgccgtaatgacttagcatgagcacgcagggcagttcctgcgcctgcttggtgtttcgtgttagatcgctgtcgggtggacgcacggctagtacaccgacggcttccagggtgtcatcgcagcagagatagtcggcggccagagaacgtgcgtaaatctgcgggatggcggcctgttcgcgcatcactaggaaccagttggcggggttgcgcagtgctacggtggttccttggtggcgctgcacgtaggttctcagcgccggaggatcgtactggcgcagatagaggccttgcagcatcgataacgtcttttgaaagacggtgtttctaaattggaaaacgccgtagtcgcagcggatagcatcttcgcagcgctcgtcgcgctgtcggagataggtgccccaggcttcggcggcggctttggtgagtagggacatgccggcggagccgtctcgacagcgagtcggataaagcgcgctgcgcgaaagcttaatataggagcagcgtcagacgaatcgcggctggtggcccggggggtgggacgcgccgcctacacaaaatgctcccgaaaatcgaaactcttgacccactccggagacaaatccgtattcagattgatgcgtcgcgcttccacttcggcttccgaaacctcggcctccgtccggtaggcgttaacaatacgctgacccaggtgccaacgctctttctctgccaaacgccgttgctcaaaccactcgtctacgtccttgaggtcaaagacagtgtcctcctcaaggtcaaagcctaggtcttcccactcgtcgtcatcgctctcgtggccggcggccatacgcgcggcaaccgcgtcttcccctcctcttctttcaacgttgggtaccacgttgttttcttcgggttccatgggttctgcgccactatcgtcatcgtcctctccctgctcctcatcgtccgccaaggcgtcgtggatcacctccaggttctgattgtcgggtacgacgtggttatcttcgtcgtcgtcgcgtggcatgggcggcggccgacggcggacgaccggcatggcgcggccgtcgtttccttcgtcttcctcttcaccgtctcccaaggaacgcggtcgacgacgttccgcgaagtcgccgcggaccacgcgcgcctgccaaatggtaaacgcgtcccaaccgtcccagttattgagcatttcggcgcgaaaacggtcgcctcgacagagccagcgaaactgccgcgcgtagtcgcggtctacgccgctgtcgaacatggtaaagtgcagacgcgccgcctcgcccatgtgtacgcagcctccattgcgttccagcctggccgcgcgccgcagaccgtgttcgtagcggcgacgcacgtacaccttcatgaggccggcgcgaaaaagttcctctaggctgtcggccagacggtagatttcaccggctagacgctgcaggggcggcgagcggtccagatgcgacttgacaatcaccacgtaaaaacgacagaaacggtcgaagatgatgaggaaggacgtgtcaaagaaaccaccggcgcggtaggagcccacggcgcctagcaggtaccagcggcaacgcagttgcagcgtgacgtacatttcgcactcggccaagcgggcggctggcgctacctcgaagggccagcaatccgtcaagcagccgaaactggtcaggagtttcaacgttttggcatggcgcccaggtgtgtgaaagttcacgtcgcgtccgtggtgttcgccaacgcaggcggccaacgcgtcggcgtcatgagcgtgacgcagcagcatcgctaccacgtcgtgcggtacccgcgtagcaaacggcgtctgtggctgacggtatacggcttcggtgtacatcataccgtaacgtgccagctcgtccagatgacgcgcgcacagcagcagaatctcttgcgagggttcgtagatgtagaggcgcgtaccgccccccatgcagagcaccagctccgtctcttcgtagtgatcttccaccatgatcacgcacttgcctagcacgataaggcgttcggggcaacaaatcacgtcgtccagcagttggtcgcgcagctccggcatggtgctgccaggccgcacctgcaggaaccagttgtgcggaatgccgagcgacaacacctggtcgacgtggttacggacccagtcgcgaagcacgtcggcgctgtactggcactcaaagatgccctgaaagtcgctcatgacccgcagaaaagtttcgtagcgcgtgtggcaatagaggaattcatcgtttcgcgtgaacgtgggagctccgtcttcccaacgtgtacgccacatgtcaaaagaggccgccagctagacaccccagaaaagaagcagagaaagagagttctttgtgcgacacgttttattccgcgtcctccgctcgacgctcaaatctggatgtactcgcgcacacccgtcaggctctttaagggaaaagggtccgagtacgtcactaaccgcgactgatgcaccagggcggtaatcacccgctctgcgccctcgcgcgtcgacgaacgcgtcgtcaccaggcagtgcagccgcgggcccgtatcgtcctgatgaccagcggcctcgcgctcggctgcttccacaccgacaatgtcgggatccaacacgtagctctgcgagttggtgtcgtagcggtgtaacaccaacgtgttggggtccagacgctcccacgcgccctcgtgcgggtcaaaacgctccgttaaacagagccagtcatactgctgctgcagaatacgccgctcgcgctcgcgtcgctcatcgggcaacgcagcgtcttcgttgaagagaatgtcccgcttgtggtctacggcacgctcgtggtggtgcgggcacagatgacggtgttccatacgcgtctgacgctgacgctcgcgttcgaagcgccggtgtcgaaagaccattttcagcaaccccatgcggaaaaactccgtgatggtgttggcaacgcgccgcacatagtggttggggtcgtccatctggatggcgtacacggcaccgaaccagtccagcagtaccagcacttcggccacaaagttgcgtcccggtcgcggacgtcccgtcacgcctagcacataccacggcgtggccagattagcacggacagcccaccaccaacgacggctctccacctcggtgagcgcacagaagggccaaatgcggtgtaactgctgcaccgttttcatcagccgcataatcaccgtaccgtaacccggtgtatgcaacttcacgtcgcaacccaggattcgttcggccgtggcgtacgagccctcgggcgtggtgtcattgagaaacaaaacatgcatggtacgcgcgcccttagggtatcgtcgcggaacaggtaccgtcattctccgcagagtggtgtgaatcacgtcgcgatacgcaatctccgaacgcgacacaccgtaacgtgccagttcatccaagttgtgcgatactaacaccatgtacttttcacgagtgtcgtaggcgtagacgcgagaaaagcgacccataaaaaccacgtacggggtagccaccatgccatcatggtgatcgcgacgtggctcgggcaacaaaataacagcgtatcccaacggcgtcagcggctcgcggcaacagatgagctttgacgccgcctgtctggcggcggtaatgatcccgtcctccgtacgtaacatcacatgccagcccttggggggacccaaggacagacaacgtccctcgttacgatgaacgtaacgcgtgatttccattggctccaggcaaaagaacagttccttaaaatcccgcaacacttgtcggtataacgccatgggatcctcggccgccacaggcagcgcggggagctccggcggcacaactgcagcgccgtcagggccagaacccgcagccggatccatcattacgcgacactctcagccggacaaccggcgtcactgacagaagccgagccaaatacagagaaagcaacgctacaccgtcaccccgctcccaagcgccgcggaaagtgctccgatttttcaccgtcgttcgcgacgttgatttgcctcggtctgagaaccgacctagcgttcggaccggtgcgcagaaacagccggcggtccgagccactgagcggttcacagccccggccgccgatagttaccggagagacgttcgagctgcaggtacatcggcgctccccgcttcgccaccccgcgcccgccccagtttatactctccgacgccccgtccaacgcgcctgtggagggccaatcggaccgcgggagctctccaagtggatgacaggcacagccgggtgcccgaccgtgaagagccctcatccacctgaacagaccgctaaccgaaggaccccgagtcgcgtccgtcggtcccgacgtccgtcgccatctggctccctgctgttggctacctctcggatttcaaaaaagagcacgtgccgatgacggtgcacaggaaagagccaaagtgtcacggcgtctttttttatttgtattcctttcctgttttgtactcgtaaactgttgacgttgtttttacatccaaaagggcaagtaagaaacaggatgaggcatggtaggtttgggcgtggggcggccctccagcacggcggcccgggccgcccggcgggtgagcacccggcgttgcgccgtatctatcttgtgtttcttctgtgtctttttcctatcttgttccgcgacggcctctttcatcacgttcagcatgcgttcctcgacgccctccagggatcctggggaggagggagtcctagtgaggcttccaatgttgttttgtggattttcggtttcctcttcttggtcgtcatcgtcggacgtgtcgtcttcctcttgatcctcttcttcgtccgagtagtagacgcatagtccctggttcatcaggctgggattcatcaggttctgacggggaatccgctgttgtagacgtttaaccgcccgttccaggcgagagctcatgccgcaccagacgctgtaacgccgcacgggcccgtagcgggctgtttgttcgcgtacatgatcgttgagctcttgccaatattgtttggcacactccagatcggaggtttgtggatagtcgggtcggatccgcggatcccaactgacatcggcggtgccagagacttcgtccagactgttacgcatagagcaccagtcgggtcggacgataaacctgtccttgcggattaaccatttataacgtagttcgtgatggcgtgtagaggcccgtacacgctccacggtcccaaagcggtcccagaagggaaagttttcgtgggggcagcgacccggcacttccaaacgttcggcgtcgtccacggcgtagtggaaacgccggccggcctggtaaattttgagcagacccacggttaacaacatatccacgctgtcagccaaccgccagatctcgcgccgagatacgtcaaaatagaaaaattcgcaggctcggtcgaccaggatcacgaaatcggcgtgaaaaacgccggagggtagcgactcgcccaccacacccattatcatggtttcacagcataagcggtccacaaagaacttcaacaggtcgttgaattgctccgtctccatacagatgaagggccagacgcctttgaggttctcggcctggccgcagagcagcaacggacgcgtcatctcgcctggagtgcgcagaggcacgcattcgccgcgataacgacaggtcacacgctgcagttcgctgatgctgttgtcgtgcaggcgaaggtcgcagataatatgatccggttgcgtggttagcagcggcgtgcgcatttgctcgccgtagatggcctcgcagtgcaatagcccgtgtcgtgcaaaatcgtccagactgtgcgccaggtagtaaagcaccccgcgatcgcggtctagacaccacacggtttcgtaacgtcctagcagaagcaccagacgggcctggctaggtggctcaatttcctctacatacacgaaaaagtcgtcatcgtccgagtcctcgtcctcagaagaggaccgcggcccgtgtactctgggcaacacggtggtagagaactgcaggacgcccagagactcgagcgactcttcgcagcagatgagctgaccccagggcgtttctggcccgtcggtgacagccgcgctgccaaagatgtcctcaaactctacaaaatctagacgccatccgggtggcgctgaaacgggaaggctaatgttcatatcagcatagctacgaactaagtggcggatgtcctgccgcaagtcttggcagagaatgagctttcgtaaacccttgagggtcctccgaacaacggccccagacgcgtagcgataggactggcgcatggtgccgcggcgtggagcggcacttggcagcctattttatggagtttcttcagtgacgtggcttgttcacgtcgttcgtgggctgcggttggcagctccggtctgtaaaccacccgaaaagactgacatcgacgtcaaagacccacgtaatttggaacatgtgcgaccgcaaagtgcgtcagaataacacgtggctttaggacataaaaagtaccgtgaggtccagacgtggtttttgtgattgacacttacaccaggtaagccaagggacggtgaaactgtatgtgaggaacctgggtgcttagacgactaacgtgtaatgctttttacaggactgttcgacaggtgatagtacctgtaaggtgatgaccacctctacaaataatcaaaccttaacacaggtgagcaacatgacaaaccacaccttaaacagcaccgaaatttatcagttgttcgagtacactcggctcggagtatggttgatgtgcatcgtgggcacgtttctgaacgtgctggtgattaccaccatcctgtactaccgtcgtaagaaaaaatctccgagcgatacttacatctgcaacctggctgtagccgatctgttgattgtcgtcggcctgccgttttttctagaatatgccaagcatcaccccaaactcagccgagaggtggtttgttcgggactcaatgcttgtttctacatctgtctttttgccggcgtttgttttctcatcaacctgtcgatggatcgctactgcgtcatcgtctggggtgtagaattgaaccgcgtccgaaataacaagcgggctacctgttgggtggtgattttttggatactagccgtgcttatggggatgccacattacctgatgtacagccataccaacaacgagtgtgttggtgaattcgctaacgagacttcgggttggttccccgtgtttttgaataccaaagttaacatttgcggctacctggcgcccattgcgctgatggcgtacacgtacaaccgtatggtgcggtttatcattaactacgttggtaaatggcacatgcagacgctccacgttcttttggttgtggttgtgtcttttgccagtttttggtttcctttcaacctggcgctatttttagaatccatccgtcttctggcgggagtgtacaatgacacacttcaaaacgttattatcttctgtctatacgtcggtcagtttttggcctacgttcgcgcttgtctgaatcctgggatctacatcctagtaggcactcaaatgaggaaggacatgtggacaaccctaagggtattcgcctgttgctgcgtgaagcaggagataccttaccaggacattgatattgagctacaaaaggacatacaaagaagggccaaaaacaccaaacgtacccattatgacagaaaacatgcacctatggagtccggggaggaggaatttctgttgtaattcgatcctctctcacgcgtccgccgcacatctatttttgctaattgcacgtttcttcgtggtcacgtcggctcgaagaggttggtgtgaaaacgtcatctcgccgacgtggtgaaccgctcatatagaccaaaccggacgctgcctcagtctctcggtgcgtggaccagacggcgtccatgcaccgagggcagaactggtgctaccatgacgccgacgacgacgaccgcggaactcacgacggagtttgactacgatgaagccgcgactccttgtgttttcaccgacgtgcttaatcagtcaaagccggtcacgttgtttctgtacggcgttgtctttatcttcggttccatcggcaactttttggtgatcttcaccatcacctggcgacgtcggattcaatgctccggcgatgtttactttatcaacctcgcggccgccgatttgcttttcgtttgtacactacctctgtggatgcaatacctcctagatcacaactccctagccagcgtgccgtgtacgttactcactgcctgtttctacgtggctatgtttgccagtttgtgttttattacggagattgcactcgatcgctactacgctattgtttacatgagatatcggcctgtaaaacaggcctgccttttcagtattttttggtggatctttgccgtgatcatcgccattccacactttatggtggtgaccaaaaaaaacaatcaatgtatgaccgactacgactacttagaggtcagttacccgatcatcctcaacgtagaactcatgctcggtgctttcgtgatcccgctcagtgtcatcagctactgctactaccgcatttccagaatcgttgcggtgtctcagtcacgccacaaaggtcgcattgtacgggtacttatagcggtcgtgcttgtctttatcatcttttggctgccgtaccacctgacgctgtttgtggacacgttgaaactgctcaaatggatctccagcagctgcgagttcgaaaaatcactcaagcgcgcgctcatcttgaccgagtcactcgccttttgtcactgttgtctcaatccgctgctgtacgtcttcgtgggcaccaagtttcggcaagaactgcactgtctgctggccgagtttcgccagcgactcttttcccgcgatgtatcctggtaccacagcatgagcttttcgcgtcggagctcgccgagccgaagagagacgtcttccgacacgctgtccgacgaggtgtgtcgcgtctcacaaattataccgtaataaaaaagcgctacctcggccttttcatacaaaccccgtgtccgccccttttttccccgtgcccgatatacacgatattaaacccacgaccatttccgttcgattagcgaaccggaaaagtttatggggaaaaagacgtaggaaaggatcatgtagaaaaaacatgcggtgtttccgatggtggctctacagtgggtggtggtggctcacgtttggatgtgctcggaccgtgacggtgggtttcgtcgcgcccacggtccgggcacaatcaaccgtggtccgctctgagccggctccgccgtcggaaacccgacgagacaacaatgacacgtcttacttcagcggcacctctttccattcttccgtgtcccctgccacctcagtggaccgtcaatttcgacggaccacgtacgaccgttgggacggtcgacgttggctgcgcacccgctacgggaacgccagcgcctgcgtgacgggcacccaatggagcaccaacttttttttctctcagtgtgagcactaccctagtttcgtgaaactcaacggggtgcagcgctggacacctgttcggagacctatgggcgaggttgcctactacgggggttgttgtatggtgggcgggggtaatcgtgcgtatgtgatactcgtgagcggttacgggaccgccagctacggcaacgctttacgcgtggattttgggcgcggcaactgcacggcgccgaaacgcacctaccctcggcgcctggaactgcacgatggccgcacagaccctagccgttgcgatccctaccaagtgtatttctacggtctgcagtgtcctgagcaactggttatcaccgcccacggcggcgtgggtatgcgccgctgtcctaccggctctcgtcccaccccgtcccggccccaccggcatgacttggagaacgagctacatggtctgtgtgtggatcttctggtgtgcgtccttttattagctctgctgctgttggagctcgttcccatggaagccgtgcgtcacccgctgcttttctggcgacgcgtggcgttatcgtcgtccacttccaaggtggaccgcgccgtcaagctgtgtcttcggcgcatgctgggtctgccgccgccaccgtcagtcgcaccacctggggaaaagaaggagctaccggctcaggcggccttgtcgccgccactgaccacctggtcactaccgccgtttccgtccacgcggatacctgacagtccgccgccaccgtaccagcttcgtcacgccacgtcactagtgacggtacccacgttgctgttatatacgtcatccgacatcggtgacacagcttcagaaacaacgtgtgtggcgcacgctacttatggggaacccccggagcccgctcgatcgacggctacggttcaggaatgtaccgttcttaccgctccaaattgcggcatcgtcaacaacgacggcgcggtctctgaaggccaagaccatggagatgcggttcaccatagcctggatgtggtttcccagtgtgctgctgatactggggttgttgacgcctccgagtaacggctgcactgttgatgtcggacgaaacatgtccattcgagaacagtgccgccttcgaaacggtgcgacgttctccaagggagacatcgaaggtaacttcagtgggcccgtcgtcgtggagttggactacgaagacatcgatattactggcgaacggcagcgacttcggttccacctcagcggactcgggtgtcctacaagggagaaaataagaaaagataatgaaagcgacgtcaacggtggaattcgctgggctctatatatacaaaccggcgacgccaagtacggtattcgtaatcagcatttgagtatacggttaatgtatcctggggaaaaaaatacacaacagctgttgggttctgatttcagttgcgaacgtcaccggagaccgtccacgccgttgggaaagaacgccgaagtgcctcccgcgacccgcacgtcttctacatacagcgtcctcagcgcttttgtagtgtggatcggatccggcctcaatatcatctggtggaccggcatcgtgcttctggcggtggacgctctcggacttggcgagcgttggctgaggttagcactgtcccaccgggacaaacatcacgcatcgcgaaccgcggcgctccagtgtcaacgcgacatgttacttcggcaacgtcgacgggctcggcggctgcatgccgtttctgaaggcaaactgcaggaagagaagaaacgacagtctgctctggtctggaacgttgaggcgcgaccctttccgtccacacatcagctgattgtgctgccccctcctgtagcgtcagctcctcctgcagttccctcgcagccccccgagtattcgtctgtgtttccgcctgtataaaaataaagagacgggaggctgatcgcggccttcagcgtctcatttgtctttactctcgagtgcggtcggtgtctcgtcggtgagacgaggccgccgcccgacaagttcgatctcatgtcgctcttggagcgcgaagagagttggcgtcgcgtagtcgactactcgcacaacctgtggtgtacgtgcggtaactggcagagccacgttgagattcaggacgaagagcccaactgcgagcagccggagcccgcacactggctggaatacgtggcggtccagtggcaggcccgggttcgcgattctcacgatcgctggtgtctctgcaacgcctggcgtgatcacgctttgcgcggccgttggggtacggcgtattcctcgggttcctcggcctcttcctccggtttcgtcgcggagagcaagttcacctggtggaaacgactgcgccacagtacccggcgctggttgtttcgccgccggcgagctcgatacactccatctaactgtggggaaagtagcactagcagcggccagagtagcggtgacgagagtaactgcagtctacgcacccacggcgtgtacacacggggtgaacaacactaatcgataagtcgcgtgtaggcgactggctacatcaaccggatatctgcggggatttaaaaagacgacccgttgtcatccggcttagagcaaaccgtccttttatcatcttccgtcgccatggctatgtacacatccgaatccgaacgcgactggcgtcgtgtaatccacgactcgcacggcctgtggtgcgactgcggcgactggcgagagcacctctattgtgtgtacgacagccattttcagcgacgacccacgacccgagccgaacggagggccgccaattggcggcgacagatgcggcggttacaccgtctgtggtgtttttgtcaggactggaagtgtcacgcgttatacgccgagtgggacggcaaagaatccgacgacgagtcgtcggcgtcttcctcgggcgaagcgccagagcaacaggtccccgcttggaagaccgtgcgggccttctcgcgggcctaccaccaccgcattaaccggggtctgcggggcacgcccccaccgcgcaacttgccgggatacgagcacgcctccgagggctggcggttttgcagtcgacgggaacggcgagaggacgatcttcgcacgcgggctgagccggaccgcgtggtgttccagttagggggagtacctcctcgtcgtcaccgagaaacttacgtgtaagaacacggcgtgacaataaacaacatagcgtaaatccccgtgtgatgtgtgtgattgacgttcgggaaacatgtccccatcatcagcgtcacaactgacgtgggttggtcactgacgtgcaggatgttgcgcgagtcagagaatcgcataagaacggggtggtgagcgggttcccacaggagtctctggcgcaaaagcaccatgagcctcaggttccccgagagggcgggttacgagaaactgggataccgcccgcatgccaaacgcgtgcgggtgcatgacccgttgggattgacgcggtttatcatgaggcaactcatgatgtacccgctggtgttgccgttcacctttccgttttacgtgccgcggtcctagcacgtcagtggtgatgctgataattgcaacatggcccatgacgaacccgcttgggacgaacgtcaataccacgtcaaaccaccgtgacttggctgaacgttgaaacataaagccaaagcgccgtcggcacttggcttcagagcagcgcctcggggcgatgcgacggcgatgaacttagagcaactcatcaacgtccttggtctgctcgtctggattgccgctcgtgctgtcagccgcgttggtccgcatggctccggactcgtttatcgtgagcttcatgatttctacgggtatctgcagctggaccttctgggaccagtggtggcggggaatcgctcagtccggacctggaaagagcaggcggaccgagccagagggaccttcgttcggcgttcaggccttaatactagctacatcttacctgtcggcggcctgtctgggggctccggtaccttacccgtcggcctgtatcgtcccgaagaagaggtgttcctcctcttgaaccgctgccatgggccactgtcaacgccgaaaaatgcttgtctggctgaggtcggtgtcgctaatgccacttttttgtctcgcttcaatgtcggtgattttcacggagcgtcatgggaaaacggtaccgctcccgatggagagcccggggtatgctgaaattcctcttaagattccgtaaacgacgttgtccagtcgttgtgccgcgattcgtacggttcatcgtctacgtcgttttgttcaccgtcgctgtgcaacgcgtgaaacaagagcgtgatgcgcaccttcggcggtatgaagaacggttacggaaaaaccgcgcacggcgtcggcagtcttttccgtgacttggggcgatgggtccgagctgcggtatgggtcacggcggcgtgtgttttattgacgaagatgccgatgtgtgactaaaaacgtcccagccctagagcgatgtgtttcaataaaaattatgtcgtatcatagtatgcgtgtcctggtttttcatttttggatgtatttgtgacataaaaggcgatagaatgtggggacgaaacatatccagatacacagttttgttattcgaacaaaacccgtgtgatgcagaaaacagtactgcaggatgaaagtcccatgggggggggggggcagacagtagtcgtttttgccgctgggcgtacgctatgcttgtatttatgactataatatgtgcactcgtgtgtcgatgttcctattgggaagggtgtcaatgtaggaggtataaagaatggtgggatgcggagaggcatcgctagacacaggttgatcgctgtgctagccccacctgatcagcgtcatgggtaaagcggtgattaagcgtgaaaacaccgtaagggggggggggcagacaggaagcttggtggcagtggccgttagatgcattacgtgtctgtattggtacatttgcaaaccgtcgggtgtggcggtatagtttagcgatgattatattatgtatgtgccgtatagaatggcctaaaacattgtaacacgaaacgttacaatgatgggaaagatgccgataaaaaacacataaaaggcatatacacgaattactagttacacgtttgtctatgtgcgagtttaaggacgcttgtataatgcgtatgacggcaaacggccgcggaaacgatggggggggggggtagtaactgtattaattatacgtcttgcagtacacggtattgtgtgctggtgcgcgtattacgacacgaacggcatagcgctataaccgggtgtatggtatttatatgtgcgtctagcatccttgcgagattctgaaagtcttcttgtaagcgtaattaaaacggtgtatgttctgcgtaaagtgcattcaaacaacgtaacagtatgggatgaatgccaataaataacatataaaagcgagaagtatacatataagggttgctagacacaggtttgtttctgtgctagcccaatggcacttgtacaatccatgcaagcaaaaaaaggatgcgaaaccaacatcgtggggtggggggggggtaaaagcaatgttaatcattggtctcgcggtgcaagttgctgcgttttacgtgtattgttacacgggttgcgtatcggtataatcggatgtgtgttactcattcgtggcgttgttatagtattgtgaaaaagaattctcgtaagcatgttgacaactgcaaaataaaaccattttattgagcattgtaatggtagtgtgtcgctacattagaaaacgtgacgcgtcgcatgtcgcggcacaatctggcagcggggtcggggtagggtacggtgggaggcatgtacacagatggaacaaaagcagaagtaacgtgagacggagcatatagtccagtatccagcggttcctgagtagcaccacccatcaactgaatgccctcatgagtaaaagtctgcgggcggcagcccttggggaccgttggcatgggacgatcgatctccaaaccacagcgtaacacggttttcttccaacgtcgttgatacacgtcgtttttacggttactccccagaacccagaaagtctcgtccaagtcgtaccaggagtcttccccagggagacgtggcggtttccaatcctcatcgtcccgtcgcaaagcacgtcccaaactggcttggggagtcaacggtggttctgtgggtcgggtgtagcgcgagtgttttccgttcatgagcgattcgtcctccttgcctttaggctttttggcctttttgtgtatcatctggccgccggcctccataaccaccgtggccaagtccagtcccagagcttgagcgtcggcgcggcgtcgggcgtcttgcaggtagtcttccacatttgcacagatggccgggtgtttggtggctagggtgaggacctcagcctcgccgcggcccggacgtagcaaaaaagctaactgcccgtgcggctcgcgcgcccacagcgcggcgcgcgggtgcaggtgcagcgcgtcccagcgcggccgctcccactgctcgcggtccagctcgggcagcagccgccgcgcggcctcggcggcgggcgccgactcgcgccccagcgccagcgcgcccaacacgcccgcgcgcagaaagtgcgacagctccgccgccagcgggtacacgtgcccgtccagcgggcagtacccgaacacggcgcccagctcgtccagcaccaccaccagcatggcgcgcggcacggtccccgacgccgccggacccgccatcgccgtcggacccaccatcaccgtcggcgccgccgctgctgccgctgccgcatccgttccgaccaccgcgtgcgcgtccgcgtttggcacgcaaatcgcgctcccgccggcggcgccgtacggctgcggaggtaaagtcacagcagaccccacggctcccgccatcgcgcacggcgcgtccccgccggcggcctccgtctccgtgccgctcgcccccggcagcaacgtcgtccccgtcgccatcgccgtcgtccccgccgtcatcgtcgtcgtcgtccccgccgtcgtccctgtcgccggccctgccgcgcagcgcagccaccgcgacggcagcaccgcgcccagcgccagccagccgcagcacagacgctggttcaggtgccgacgcacggccgtcagcagcgacgcggggtgcggcgccgacgcgaacggctcgtactgcgccagctcctgccacgcgcccagcagcaccatcggctgcagtcgcctgcccggcgtctgcagcgccaccgtcgtgccggcccaccgccggcgcagctcccgtccgagcgccgtcgcctcctcggcgcgcagcaacgtctggcgaagcgccggctgaggcagcagcgtcgcgcgcggggtgcccacgcccagccggttgcagcggtacaggcgcaccacctcgcccgcgccgtgccgaaaccactcgtccgcgtcgcgcgccgccaggatcagcgtgttgttcgccaggtcgtacacgaacacgcggaacccggcgcccagcgccaggtacagtccgtcctgcgcgcacagaccctcgggatggccggccttgtcgcccaccgtcgggtcggccgcggggtccacctcgtgcaccacggtcgccaccagcacgatccacgcgtcccgcggcgacagctgacgcaggtccgtggcgcccacgccgttcatctggctgcgcggcgtcactcgcgcgtagaatccgtacggccgtccgagcggcagcagcgtgcccgcgtcgcgctgcgaccacttgcgcatggcgcggcccgtgctgttggccaaaaacgcggcgcgccacacggcgcccatggcctggtattccagctccgtcagcgcctggcgctccaccggaatctgagacagcagcaagcgctccgggccgtgccaaaaggtgctgttgttgccgctacccggaggggcgcccggcggcccgcggggttctacccggtggacggcgtgggccggcgtcgccgtacccgcagtactcgtactagtccccgctgttgacgtcgcttccaaagaagaagaacgagaggaaccaacccccgaaggccctccggctccgcggccgcgaccgaggggcggggggcgcggcgacatgccgttgcgctgggccatggccgccggacgcctccgacgtccactctgtatatataggaagcaaacccgcgtcagcgaccacgccgtttacacacgcggacgcctccgtcgcccgtgtgccgcgggcgacacgcacctggcttttataggcagcgacgtgcacggcgcttgctggcgccgccttgccgccgcgcagtctggaaggccgtgaaaaaaccgaaagaagatgcgcgacaagccaccaacaacgggccgccgagcgcgcgcacacctaggtggacgcctgacctccattccgggccgtgtgctgggtccccgaggggcgggggggtgttttcatcgggggggtgaaatgtgggaatttgggaagttggcggtggcgggggacggcgacggcgaataaaagcgccgtgcggcgcgcacggcgaaacccagacgcgcgtgtgtcttgcgtctctttcagtcgcgcgtctgtcttgcgtgtctttgagtccccggggaaaagaggaagcggtcccgaggggacggcggcgcgactccctggggacgcgaagatcggacgcggaaaagaggaagtccccggggacggccacaggcggaaaaaaaaaacgaggaagccgcagcccagtctgccgggaccggcaggcaggcgcacagacccgcgtcgaggacacacgcagaagaagcgcccgcgccggggcggggggggggatcgcgggccccggggcacactgcttccatctggccgcgcgcacaccccgccgacacacccctgacacacccgcgacacacccggcacacgcccgcgacacacccggcacgcgcccgccacacagccagccgacacacccgcgacacacccgccacacccagccgcacccggcacacacccacccagccgcacccccgccacacccagaccgacgccggtgcgggaccgggctccattccgggccgtgtgctgggtccccgaggggcgggggggtgttttcatcgggggggtgaaatgtgggaatttgggaagttggcggtggcgggggacggcgacggcgaataaaagcgccgtgcggcgcgcacggcgaaacccagacgcgcgtgtgtcttgcgtctctttcagtcgcgcgtctgtcttgcgtgtctttgagtccccggggaaaagaggaagcggtcccgaggggacggcggcgcgactccctggggacgcgaagatcggacgcggaaaagaggaagtccccggggacggccacaggcggaaaaaaaaaacgaggaagccgcagcccagtctgccgggaccggcaggcaggcgcacagacccgcgtcgaggacacacgcagaagaagcgcccgcgccggggcggggggggggatcgcgggccccggggcacactgcttccatctggccgcgcgcacaccccgccgacacacccctgacacacccgcgacacacccggcacacgcccgcgacacacccggcacgcgcccgccacacagccagccgacacacccgcgacacacccgccacacccagccgcacccggcacacacccacccagccgcacccccgccacacccagaccgacgccggtgcgggaccgggctccattccgggccgtgtgctgggtccccgaggggcgggggggtgttttcatcgggggggtgaaatgtgggaatttgggaagttggcggtggcgggggacggcgacggcgaataaaagcgccgtgcggcgcgcacggcgaaacccagacgcgcgtgtgtcttgcgtctctttcagtcgcgcgtctgtcttgcgtgtctttgagtccccggggaaaagaggaagcggtcccgaggggacggcggcgcgactccctggggacgcgaagatcggacgcggaaaagaggaagtccccggggacggccacaggcggaaaaaaaaaacgaggaagccgcagcccagtctgccgggaccggcaggcaggcgcacagacccgcgtcgaggacacacgcagaagaagcgcccgcgccggggcggggggggggatcgcgggccccggggcacactgcttccatctggccgcgcgcacaccccgccgacacacccctgacacacccgcgacacacccggcacacgcccgcgacacacccggcacgcgcccgccacacagccagccgacacacccgcgacacacccgccacacccagccgcacccggcacacacccacccagccgcacccccgccacacccagaccgacgccggtgcgggaccgggctgaggggggtgtaagcgccttgacgcgcggcgctatggcactgcgtgccacggtattggttggcgggacgaggctgaggggggtttgcgggacgtaagcgcgacgccgagtttgcggcgtgctgtggcgcgctcaaggctagggacgggggccgcgcgtagcttttcggcggcgacggggaacaaaacaggcacgcacacgcagctcgcttcagcggtcgccctatcggcaccgccgctattctttattaacgtcgttctccccccgcttctacacgcggaccgctgcagacggctatgctcagactgtttctcttgacggcgacatgtgtttgcgtctgtgcggcgcggcgacggccgcaagcggacgacgccgcctgccaccacacgtggcccacgcgctgcgccggcccgcgtcccgcgccgtcggctcacaacacggcgctttcttcctcgcacgccatctccatcgcacaccgtgtgctgcattcgccgtcgcctccacgagagaacatccgccacagcatgcgctgtcgccgtcgcgccatggcctcctcggcttgcacacccgtttcgcacacccagcctcgggccgccaaccacagccgttcgaggatgacgtacgcgacgagcgagcccaccaattctcccacggcctcgcccgccaagtcagacggtggtgttgcctgcggcggggacgggggttgcgctgggatcgggggtggcgccggggacggggggctttcgcagcggggaacacacaccgcctatttaacctccacccgctacaacacacacatgccgcacaatcatgccagccacagacacaaacagcacccacaccacgccgcttcacccagaggaccaacacacgttacccgtacaccacagtaacacacaaccgcaagtccaaacctcggacaaacgcgccgccgaagaccaccgcacgcagatggagctcgacgccgcggactacgctgcttgctcacaggcccgccaacacctctacggtcaaacacaaccccaactacacgcataccccaacgccaacccacaggaaagcgctcattttttcacagagaatcaacatcaagtcacgcatctacttcacaacattggcgagggcgcagcgctcggctaccccgtcccccgcgcggaaatccgccgtggcggtggcgactgggccgacagcgcaagcgacttcgacgccgactgctggtgcatgtggggacgcttcggaaccatgggccgccaacctgtcgtgaccttactgttggcgcgccaacgcgacggcctcgctgactggaacgtcgtacgctgccgcggcacaggctttcgcgcacacgattccgaggacggcgtctctgtctggcgtcagcacctggtttttttactcggaggccacggccgccgtgtacagttagaacgtccatccgcgggagaagcccaagctcgaggcctattgccacgcatccggatcacccccctctccacatctccacgcccaaaaccaccccagcccaccacatccaccgcctcgcacccacatgctacggctcggccagatcacacgctctttcctgtcccttccacaccctcaaccacggttcacaatccccgaaactacgccgtccaacttcacgccgaaacgacccgcacatggcgctgggcacgacgcggtgaacgtggcgcgtggatgccggccgagacatttacgtgtcccaaggataaacgtccctggtagacggggtagggggatctaccagcccagggctcgcgtatttcgccgccacgctgcttcaccgatatccaataaacccatcccctcgccacgacgtctccgcgtatctttgtagcctcaggaatccgtccccacgtccacccatcccgagcactccacacgctataacagaccacggacacggcaaatgcatgcaaacttctcatttattgtgtctactactctgtgttgctacagggggtgaaggcaaagaaaaaaaaaaggaacaaaataatagattagcagaaggaataatccgtgcgaccgagcttgtgcttcttttcttataaggaggcaaatatactagggaaaacataagaataggaagaaaccgaggtttgggagaaaagctgagataaaatagcgcattttccatacagaggttgttgtttttgtggatcctaagaggtttcaagtgcgaatcttaaagttctcacgagaatattgtcttcaagaatcgacaactgtggtccaagatttttttttggtctttttaggttctgcgagggacatcacgatggatcgttgcgatgaagtcacgcgtacgcctctggtgtggcgcggtgtcgtgacaggagagtgtgttttcagtgcagagctgtcttgattcctatatccgagtatctgttttctcgtaaggacggtaatcttctttggtgtaagtacatctaaaagctgcaaactatattttaagggctgtctctaggtgtactttgatgctggagtttttcgctgtgttgatgtgaataaatctactactactattatatgcagaaagagtgattatgccgagacaagattgcattggctgaactgtttcaaaaacgcctacactctacttatccgtaaacctaaggtaatactatgtgtaagttgttttttttttctttttgtagtaaaatggtgatacgtgcaattaaaactgtattccatgtttccatcctttcatttcaactttaaaggcggctttgagagcgaagaagtgcgaggataaaaatggatgactccttcgtgtccagggagtcgactactgcaacgctgattgattaaaagatggtctccgatgatgatgttgttattgatcgaatcatggtgcagaacggcgacggagaggagcgtgtccgccgccgggaaggtggtctctttctcttttcttttttcaagaaatcttccatgtgtttatcgtagtgatcgaaatcgactgatctcgggttctttttgttggtttcttttcggttaatcatgtattgttttctttttttacagaaagatacttttttcatgagcaattcctcgcccggcgccggcatgccgaggtggggccactgcgatcagcggcatgccgacgccgacccggggatcttggattcaccgttttctctcttctctctctacatacagaccgggtggcaggagcggtaaggaatcatcgtcgtctttcattcttcgatgattatggtaatactaaatcttatctaggagcatatacatctaagattggagtactagtagtcgtttgtggtttctatttttttttatatttatctatgacagtttttctgtttttcgttttgataataatataataaaaactcatggacgtgaaatctggcttggttgtggtgatttcattctcattattgttgttttctttccgtcttgcggatgaagatgttgcgatgcggttgttgttggtgttgctatacaccgagagagatgatctttttgttcttctggttcatttcctatgattgtttggctgctgaccgacgcgtcaggatgtgcagggcatgcggggaatcaggaccggacacgggataatttcatctacctatacggagatcgcggtcctcgccatgaggatcgcgacaggcgcgtcgagggggcaggaacacccttgcggattgacattcttggtggtgtttcgttgttgtcggtagttgttgttgacgatgaggataaataaaaatgaccttgtttttgttctgttttctcttgttgggaatcgtcgactttgaattcttcgagttatcggaaagctgaggtacccaaatgtctgtagcttttttctttttaccctcttgtttatcatctgcgattcgtggtaggtaggagagggaaatgataatccgagattaaggaaaggagaagataaaataaaaaaaaaataaaacagaagccgaccggccgccgacccgttccccaggaccagcctacgaggaacggataacgcggtggcgacggcagcggtggtggcgctgggggtggcggtagtggtactgctgatggtagtcgggacggaggagagacgatgcatacatacacgcgtgcatgctgcatgggtggatggtccgaccgggagacgcggaagagaaactcacataaaaaggtgacaaaaagagcggttgaaaaaagaaaacgagattcgaccagacagaagaggaggaccggggcttggcgacccttccacgactgctgttgtcatctcggctcctccgtcttctcccggccacgggcggctaagtcaccgccgttctccccatccgtccgagcgccgaccgaccagccggccgattcgcccgccggggcttctggagaacgccggggcagcagcgatctggagaagccgctaaacccctgcgtttttatatggtagctctgccgagcgcgggctgacgcgttaagtaagcggaaagacgtgtgtgacgaaaaggggtcccatggtatttcacgtgacgatgaggagatgcggtttggagcacatacggtttagaaaaagggagttgtcgtgacaagggctgagggacctctgtctccatgtgtgtataaaaagcaaggcacgttcataatgtaaaaaagaacacgttgtaaacaagctattgctgtatcattcggctgactatgcttcattcggactgattttcttttcctaacggcgtaacttaaagtgattaacgtatgatatttgttccccagagttatactatagtcatcatcctaaaattcagatataaatgaacacatgtcgtatgagattattaagaaaccgaaaccacccatagttcaccatcctcttcatcattcagccgatgacccactccgtacaacgactcagtctgcttcgtcatattgcaaagcacaagcgacgtatgtgaacaacttgaaacacagactgtgttattaatgaccgttgtaccattactagtcacattgcataaagatcctccgccgtcgtcccatcttttccactcggtggaaaaccggtcgctatcatcaactatggtgagattttcaccctgcgtggtattcagtttcttcatattcataccttggattccattattaaaccccaatattaagcacgttattagtaccccccccccccaccaaggaatgtgactggaccggttcctagcagctctgggagccatgttcaggttgaaccacagctacagcgaaaccgagtccagtgaccggtaaccacgtccagcccctgcgtatgtaccagtccaagcacgtccggtcattgttctacacaggaaatctaactaggtcaacgtaattttattccaccgttacgcagaatactaacaaaaaactacacaaatgtaacggattacacataatttattacgtgaaaactgtaagaaagccaattcaccaagcgatacatttatttgacttccaagtgccacacatcaccactatattcatccatgttttcaccgaaccaacgagacagatcgaagaagccagaatcttccgactttaaattacataaatccaacgtattatgaccacagctcgacacacaaatagttgcgttactattcacagtggcattacctatacccgtaacgttgcacaaccactgatcaccattgtcaccaaaaacggttttccacttagttgtcaacggatctttcctatgcgtaatggtaaaattactaccagtcgtcgcttttagctcattacgagtattatccgcatccacatatatcaacgtcatagctaggcacgctataagtaccccccccccacaatggaatgttgccaaaccggttctttcccgttatagccatagcgttcccaggcaaaagcaaacgccgaacctaatgcagtaaaaagcgcttgcagccagaaccagcttatgtaccagccacgataacatccggtcactgtttccacaggaaaccctaccagggtagagccccgcttgttttttcctgtctatcttgtttagcaactcgtaaactgtcagtctagccacgtccgtttagatcaaaagtcacgtatactgcgacgttgtttccacccgtttccccgtcccgccgtttccgaacaacccacccgggttcagacaaccgaccaccaacagaaatatacacacagaccaccgggagttcagttaaagatttcatcaggtttattttggctgctgctagtcttttgcttcttagaaaaaaaatacccatatagagaaataatgatagtttgacaacacatatggcagggatttcttcttcatcaataagatatgcaattcccccagggagagactttcaacaattgaatttacaaaaacaaaattacatcaggagaaagagaggatacattaataaatatattatatctggtgtatatactgaatgctgctggttcataaggtaacgatgctactttttttaattccaagatggtttttctttgttagtcttttgttgacttgctggttcctaaaagttctcaaaaacgattgtgtgaagattttatgacgttggttgactagttcatgagattctgctgtacgtgtgatggttattcgctggttcgttctaagatgagtatcgtactgtgtctgcgatggtcgtctcttactggcattctctcggctgcctcttgctttcatgattgaaaaggaaaaaaggactccgagggcgcggtcatcttttacttttcggttttttcgttggcgggtcagaggtagtcagatcatgagactgtcgtggtcgatgaaactgtgtctgctcaagtgacgtccatttcttgtacggagaaaaaagtcatcgggataaataaggctatacaaggcgttgtcaagcgtgcggctctaaacaaattaagcgatacaaaattacagtaatacgaataataagttaccccctccccctgtggtccccccgagacgagagccacccatcgtgtactctcgcaccacccacgaccacagagggagacgggacgaagagacgacgcagagcgccatctccttctggaggccggcggcgttaactgctacagctgcggcggcgacaacagctgcgatttgtcggccgacatgccgatggtatgggcggcggcggcagtggccgcggcagcggggaggagaggagagagaagaggagcggggcgtccgaaggcgaggatggcatggtctcgccggagcgcccggcttttatggaacgctcgcgtccggtcgggcagcgcccacaggaagatgagtcaaaacttttaaaccatcctgagacccgagtagcggtttacaggccgcacgccagtcttagctaaaaacagcggacagtcccacgctgtttctgttgtggctctctccagtttcctcatcgccgtcccgatctccgtcgtcatcggaagaataccacccgctctcatgcggcagtcgatcgacctcgacgaacgagacgcggcgacgcctctctacggccgactggttgtggtggtgaaagaagagcaccagcaatcccaggaggagcaacaagccctcacatgtccaggaggtcggggagagggcctgtcggagatggccgtgaggcatcacgtacggcagctgaggagaaacggagaagaaaggaaaattaccgtcaggggccggggttcttattagagaaacagcacgtaggtcaggatccagatgctaatggcaatcatgatgacgatgatcatgcaggccaagacgcggcgcaccaatgccgaatccaatagccgccgtgcctccggttggtggccggcggcatctagagacatgatttgggggggaccggcggcgcgaaaagacagggagatggacagtgtcacggtgttttgttatgattaggacatggggaccggaagccgagacagagtactacagggtgttgaagggtaacgtgagggagatcatgtcatgggcgggctgaagaccgtgcggggaggattggcgtgtgcggtgcttgtggaacacggtgttttaatatgtatccgcgtgtaatgcacgcggtgtgctttttagcactcggcttgataagctacgtggccgtttgcgccgaaaacacggttaccaccaactgtctcgtgaaaacagaaaatacccacctaacatgtaagtgcaatccgaatagcacatctaccaatggcagcaagtgccacgcgatgtgcaaatgccgggtcacagaacccattaccatgctaggcgcatactcggcctggggcgcgggctcgttcgtggccacgctgatagtcctgctggtggtcttcttcgtaatttacgcgcgcgaggaggagaaaaacaacacgggcaccgaggtagatcaatgtctggcctatcggagcctgacacgcaaaaagctggaacaacacgcggctaaaaagcagaacatctacgaacggattccataccggccctccagacagaacgacaactccccgttgatcgaaccgacgggcacagacgacgaagaggacgaggacgacgacgtctgataaggaaggcgagaacgtgttttgcaccatgcagacctacagcacccccctcacgcttgtcatagtcacgtcgctgtttttgttcacaactcagggaaatttatcgaacgccgtcgaaccaaccaaaaaacccctaaagctcgccaactaccgtgccacctgcgaggaccgtacacgcacgctggttaccaggcttaacactagtcatcacagcgtagtctggcaacgttatgatatctacagcagatacatgcgtcgtatgccgccactttgcatcattacagacgcctataaagaaaccacgcatcagggtggcgcaactttcacgtgcacgcgccaaaatctcacgctgtacaatcttacgattaaagatacgggagtctatcttctacaggatcagtgtaccggcgatgtcgaggctttctacctcatcatccacccacgtagcttctgccgagctttggaaacgcgtcgatgcttttatccgggaccagggagagttgtggttacggattcccaagaggcagaccgagcaattatctcggatttaaaacgccagtggtccggcctctcactccattgcgcctgggtttcgggactgatgatctttgttggcgcactggtcatctgcttcctgcgatcacaacgaatcggggaacaggacgctgaacagctgcggacggacctggatacggaacctttgttgttgacggtggacggagatttggaataaaagatgcgcgtcaaccgtcaaagacgcaacaaccttacgtaccgacaaacggtatatgtaattctgaccttctacattgtacataggggcatatgtaacagcaccgataccaacaattctacatctacttcaaatagcaccgtctctgatactaatgtatattctactccaaatcctcccagtgtatcttctacaactcttgatacatctaccgactcacagatatcaatcgcctcaaacaccatatccagcactacaaatacattgaccgcatattctataactacgttaaacacctcgacttcatcttcaactcttactgctgtctctagtacccatacaagatcctcaatactctccaacaacgcatcatacaccacatcattggataatacaactacagacataacgtccagcgaaagttcaatcaacgtgtcgacagtttacaacaccacgtacattcctgtaacatcgcttgctattaattgtactgctacaattaacggaacaaataattctagttcaaaaacttgccaacaagacattgaaacaatacctgtgaaatcaactccactaacggcagaagaaggaacaaatattacaatacatggcaatgacacgtgggattgtcccgacgtggtttggtatcgacattataattggtctacacatggacaccacatttatcccaatacacattacaaaactttgatacatcgacgcaagatcctaacgtcacatcctatatgttattctgatcgctcatcacctaccgcgtatcatgatctatgccgttcatgtaataaaacagaactacgcctttacgatttaaacaccaccaattctggtagatatagccgacggtgttacaaacagtaccatcaccagggaccacacgaggatgaaaatttcggactaactgtaaatcccaggaacaacactgacaattataccatcccagtatgtcccagatacgtagaaacacaatcacaggaagatgaacaagacgacgattatacactaagcactaccataaataataatcttatgcgcaaaacaggtcactatgacatctcacatggcacgcacactacatgggctcttatactaatttgcatagcctgcatgcttcttttttttgttcgacgagccctcaataaaaaatatcgtccactacgagatgatattagtgaatctagccttgttgtgcaatatcatcctgaacatgaagactaacgtttccggacatgcaacacataaaattaagtaacatatctaccatgaagtacagcaaatatctactaatgtctatccatccaacagtgataccatgcactggcatcttgcgattacatggacggtaatcatatccacgttttcggaatgttgtaaccaaacttgtccgtgttcctgcgtttgtgtcaattctacaacagtcaacatatccacaaatgaaacaacgtctaaagccatcactccaactgctacgacaaataccgcaaaaacaacgtcaagccttgttattactacaccgtcatcagtaacgattagcaaagccgtgtctactgcagcttcatcaaccatactatctcaaaccaatcgcagtcatacaagtaatgtcatcacaaccccaaaaacgcggtttgaatataatatcacgggatatgttggccaagaagtgactttcaacttcagtggatcattttggagctacattgaatggttccggtacagttctccaggctggctttattcctcggaaccaatatgcaccgttaccaacagttatcatcatactttccctcgtggtaccttatgtttcgattgtaacatgacaaaatttgttatttacgatctaacgttaaacgattctggaaagtacgttgtcaagagaacacgtcatgacaatcaatacgaagaagcatgctacaatctcacggtaatttatgccaacacgacagccatagttaccaacaggacgtgtgatagaagacaaacaaaaaatacagacactactaaccatggaatcgggaaacatattattgaaactattaaaaaagccaacattcccctggggattcatgctgtgtgggcgggcatagtggtatcagtggcactcatagcactatatatgggtaaccgtcgtaggcccaggaaaccgcgttataccagacttcctaaatacgacccggatgagttttggactaaaacctgatatgcacatcaataaacttttttgtatctttagttattaatgtctgtgtgtttattcagaataactcatttataatataagacggaatattcatatacattaaaaacatgggtgtacaatataacactaaactgttattagccgtattagcaattatcccagctggcattctagtacaggcaatttcacatgagcaaaaaacatcctaccggcaacttttgctgcaaagtgaacgtgtgcaaatacccatcacaacagtcgagggagatacaatttgctttaacgttagtaacaacccctgcaacttttccagttattggaatcacaataattgtgaactttgcggttggacaccgtttttctttgaatatgctggatatactgaaaacacgtcgtgtcacccacgatttacctgtattcatgatactaaaggtctaaaactatacaatgtaaccatgaatgactcgggaatttatacacaacacgtttatcactgtgatattccatgtaacatcagcgatgatcgtaaatataacgtagatgacattgataactgcaacgctactataaatgtaaccgactatattattaccgtgttgtcttcacgttattctaaacgcaccgattaccacgtagatacttacattggttatgcaaccactgtggtgacaatagtatttatctgtgttttaacttgcattaacgtctcagcaactctaaggcacagactacgaactagaaacaacgttaacagcataacgtgattacaaagtatcaacgctagtttatccaagagaaactttcatgaaggatcgcaataaagcattgctatgtatcatctttattttaatcatgtacctcatttatatttattttaaacgtcgttgtattcctactccgtccccagacaaagcggatctgcgagtggaatttccctcattacccccgtgtgtcggcatacagtgcgctgcataagaacacgcatgacacatagcgtacctctggacggtacagtatatgataacatgattcaaggaaagtatggattcctaccgacatgttatgacagaacacacaggttttctgcgtgttttataaaagagcgtctcgaagcagcttgagccacactacggtccagataacgagcgttgcaaaaaatatgccgcgcagtagtcgaaagccgtactgagcgtgcgaagcgggtagggtgccgaacgacggatatgcgccgttgtcatcttcgactataaggatcgcgaccgagtcttcgggcatggtaaaagccacacggtgtggttgatatgtagcgtatccggtttggaatcgttcggctccggctcaggggatagtgaggaattctcaggggacgatatgggacccaatgactggataaaagaagggtttttcccagtaagatgatccccgtatcacatgaggtctggatatatataaatgaggagtgaaataggcaaagggtatcagacaccagcctcgtcatgcagccgttggttctctcagcggaggaactatcgtctctgctaatttgcaaatacatcccaccttaagcgacgagtccataaagcaccgttgtccgggtacggtgaaagtgacccggattgtagcacgtcccttttttgtttttgcatcgtttatcgtcaccactagtgcaatattttgatcgtaaggctgaaagagtattgttatgatgcttagaacgtggagattattacagatggtactgcttgccacgtactgttattatgtttttgcgaattgttcaatcagcacgacgactgctcctgtggaatggaagtctcccaaccgtcagattcccaagaatattacctgcgctaattactcagggaccgtcggcggtaacgttacttttcagggtctcaagaataaaacggaagactttttatcttggctactcgggtctggctataagtccatttgctcgttcttcccacaactccctggtgattctaatgagcagcattacagatatgaagtaaccaacctcacgtacaattgtacctatgaccgcctaacgttactgaatctgacaatggaaaacagcaggaattactatttcagaagagaagatgcgaattccaccttctactactcttgttacaatctgaccgtgtcctagagaacgcacgtgaagttccacagagccgcgtggctgtagctattgtttacgttgcttttgaaatgttaagcgtccctacggcgctaacatgtttctaggctactctgactgtgtagatcccggctttgctgtatatcgtgtatctagatcacgcttgaagctcgtgttgtcttttgtgtggttggtcggtttgcgtctccatgattgtgccacgttcgaatcctgctgttacgacatcaccgaggcggagagtaacaaggctatatcaagggacgaagcagtattcacctccagcgtgagcacccgcacaccgtccctggcgatcgcgccgcctcctgaccgatcgatgctgttatcacgggaggaagaactcgttccgtggagtcgtctcatcatcactaagcagttctacggaggcctgattttccacaccacctgggttaccggcttcgttttgctaggactcttgacgcttttcgccagcctgtttcgtgtgccgcaatccatctgtcgtttctgcatagaccgtctccgggacatcgcccgtcctttgaaataccgctatcaacgtctcgtcgccaccgtgtagctagttagccagctgtgtatagtttgttgtgttttgcttttgcgtatttgttttcagtcagagagtctgaaacggggtgggagggacttttgcgggtaatgcatgctaaaataaacgggtgggctggggtgtgcttggtaactcactgtttgaatacgcgctcacgcacatatgtagcactcaacatgttagcttttgcccgcacgccccggggcgtgccgagctgcctttttaataaagtctgggtttccagatacgcgctggttctgattttgatgatttgtgcctctgaaagctctacgagctgggccgtgacatccaatcgactgcctaactgtagcacggtaactacaacagcgggtcaagacgctgaattgcacggtccggcaccgttaagctgtaatgtgacccagtggggacgttacgagaatgaaagcacacccgtattatggtgcactttatggggatcacgcatgcgagtctcattaggacaccgtgtagcgtttggctgttcttggaaaacattttttatttataacgtttctgaaagtagcggtggcacttactatcaaaaaggttacaactgcaccgacaaacatataacactatcttgtttcaacctaacggtggttcctcgagcggttcaaagcacaaccaccgtaatgacacccacggtggttacaaactccacattcagtgtgtcacttattgcgttgagactgacgacaaattccagcgcggttggacacgctagttatcaacgacaacagcgtgttgaaaacgggacgttatccaagaacataactaacttggcattcacctatggcagctggggcgttgcgatgctgctgtttgccgccgtgatggtgctcgttgatttgggtttgcctcaatcggcttggcgacgctggcaaagccacgtggacgatgaagaacgtggtttgttaatataggaagtaaaaggcactgttttagcatgactgtttccaaaccgtaacgtggtaaataaatcatggcttccgacgtgggttctcatcctctgacagttacacgattccgctgcagagtgcatcatgtgtacaataaactgttgattttagctttgtttgcccccgtgattctggaatccgtcatctacgtgtccgggccacagggagggaacgttaccctgatatccaacttcacttcaaacatcagcgtacggtggtttcgctgggacggcaacgatagccatctcatttgcttttacaaacgtggagagggtctttctacgccctatgtgggtttaagcttaagttgtgcggctaaccagatcaccatcttcaacctcacgttaaacgactccggtcgttacggagcagaaggttttacgagaagcggcgaaaatgaaacgtttctgtggtataatttgaccgtgaaacccaaacctttggaaactactccagctagtaacgtaacaaccatcgtcacgacgacatcgacggtgaccggcgcgaaaagtaacgttacggggaacgccagtttagcaccacaactacgtgccgtcgctggattctccaatcagacgcctttggaaaacaacacgcacatggccttggtaggtgttgtcgtgtttctagccctaatagttgtttgtattatggggtggtggaagttgttgtgtagtaaaccagagttatagtaatgtgttttttatcagggagaaggttttgtaccaacaatgactacatcggggctatctgtgtcggaaaattatgacggaaattatggactcacggaaaccgccaatacaacgcgtacaaatagcagtgactgggtaacgttaggaaccagtacgccactgttgggaagcacggagactgcgatcaatttcggcaacgcaactacggttattccacaacctgtggaacacccggctggagaagtacagtaccaaagaacgacaacgcattactcttggatgctgattatcgttatcattttcatcatttttattatcatctgtctacgagcacctcgaaaagtttatgatcgttggaaagacagcagagagtacggacaagtgtttatgacggatacagaactgtaatatactatgatgtctaagaagtgtttgcggttatttccatggatgacaattttgttttgcataccaaaagcacaacattggaactatatgacaataccatgcgttcttaaaattggacgcggcggtcaaaatatgagtttgcctccccttaacaattcattgtacggaaacgatatttttcaatggtatacagacagaccgacagtcaccaacacgttatgtctttatcaaaacaatgagtactacacacaatccaatgaagatatttcaaacatcaaatggcaatgtacaaaaaaccatacgttaattcttattaacctaaccgcaacatatagtaggaactattactttcaatctcttaaaactcttgggcaaggaataccgagaccgagcagcttatgttataatgttagtgtacaccttacccaccaaacacattgtcatacaaccacattatccctgtatccacctacacctgtacacaattcattaacaatatcaccgtcattagcttcaaccaactttacacatgttgcggtccatcatgccgcaggtaacgttgaagcacaacacaacactgccactccacatacaacgtggatcatacccctggttatcattataacaatcatcattttaatttgtttcaaatttccccagaaagcttggaataaattcacacaataccgatacaacagtatgctcgccgccgcttaaagaatcaccgtcgaggaaactaaaagctatgtacgtttatttttcagctcactgtttgaataccgtaaacataatgacgtacatatacgtggttatacaacaggtgtttgtgttatgcggcgactgattaaccatatcgtgaaccatgatcttttccgatggtctgtcgtgaccgcaatgatattttacaagtattccgaaacctgtatggaggtcactgtcagagtaggtgatccagttaccctcggtagtggacatggttatcatccaggacaaaaagtacactggtataaccagtcatgcgtcggcatcagcaacggcgaaaatacgcatcctatctgcacctacgaccctcctaaacctggtagacaaaagacaatgaaaaccactccgttgccatcaccactgttgtatgaatgtcacaattccacattaagcattcttcatgtaaacgtctcagatcccagaaactattgcaggcgaaaatgtccaccaaagggtaactgtgagtttcccacatgttttacattatcgctgatttctagaacgacaaccaccagaagacccggacaaaaaactacgctgtcgcgattaaaaactacgccaaataaacatacgcagcacaaaagatccacgcgaagaacgtcacttaaagattacaatgtaacgggtctgccgaaaggctttgcggactcgtttaccggtaacgtagaggcacatagagccaaagatgccgcacacagcgcatggattctcattgtcatcatcattatcatagtcgtcattctgtttttcttcaagattcctcaaagactccgagagaaatgggacaccaagggatacctttacaaagggaccgatggcctgcccactacggactaattatcgtgagcggacggatatgtccggtttcaaactcactgtttgaatatagggacagtccctacggaacctgagaacatgtggaaatcacctgtggtagaatgctgctcaggtacattacctttcatcgcgaaaaggtactttacctaacggctgcatgcatctttggtgtctacatcagcctccatgatgcctgcataccggtggttggcaagataggtaccaacgttacgttgaacgcggtagatgttctttcccctcgcgatcaagttcgttggtcatacggtccaggcgggcaaggctacatgttatgcattttcactggcacatcaacaacaacgtttaacagcacgcgctttaatttttcatgtctgagtaattacagcctcctcctcattaacgttaccgcgcagtatagtactacctatcgtactatgacatcgctagacgattggcgtcaccaaaaacataaccatggttttcgatggactttagacacatgttacaatctgacagtgaacgaaaacggtacattccccactaccaccaccaaaaagcccactacgactacgagaacgacaactaccacaacacaaaaaacaaccaccacgagaacaaccaccaccgccaagaagacgacgataagcactacccatcataaacactccagtcccaaaaaatccaccacccctaacagtcacgtagaacatcacgttggttttgaagccacagcagcggaaacaccgttacaaccaagcccacagcaccaacacgtggctacacacgccctctgggttttagcggtcgtaatcgttattatcatcattatcattttctactttcgaataccgcaaaagctgtggctgctctggcagcatgacaagcacggcatcgtgctcatcccccaaaccgatctgtgagcaagtcgcgtaggaaacgattgcatgaaatcactgtgaaacgccaactccgtgccaactggcacggcggacaggcctttgacgtatttgaagccaggcgcgctcttgataccgaaaggatccgagggggctttccaaagccgacgtccctgattcccttcataaagctgttgaccggccctagaaagaccaagagcatgctgtgggcccactgcggtcgcttcttgcgttatcatctgctcccgctgctgctgtgtagactgccattcttactcctttttcagcggccgcagtgggcccacggcttggacattgtcgaggaggacgagtggctacgggagatacaaggagcgacgtaccagctgtccatagtgcgccaagctatgcagcacgccggattccaagtcagagcggcgtcggtcatgacacggcgaaacgccgttgacctggaccgaccgccgctttggtcgggatcgctcccgcatttgcccgtctacgatgtgcgttccccgcggccgttgagaccgccgtcatcacagcatcacgccgtatcacccgaactgccgtcgcgaaacgggatacgttggcagtaccaagagttgcagtatatggtggaagaacaacggcggcgaaatcagtcgcgtaatgcgattccgagaccctcgttcccccccccggatccaccatcgcagccggcagaggatgcacgagacgcggacgcagaacgtgccgaatcaccacatagtgcagaaagcaccgtcaggcacgacgcgagtgagaacgcagtgcggcaacggcgcgaaagacggcgctataacgctctgacggtccgcagccgggactcgctgctcctgacgcgaatacgcttctccaaccaacggtgtttcggacgcgggcgtttgagacatcccgcgggaagtggtcccaacaccggcggaccgcgacccggcggtgcgggactccgtcaactacgccaacaactgacggtccgctggcagctgttccgcctacggtgccacggttggacacagcaagtctctagccagatcagaacccgctgggaggaaagcaacgtcgtgagccagacggccacgcgagtacgtacgtggtttgtggaaagaaccacgttttggcgtcgcacgtggattccgggacagaacccggcggccgaagcgcaagaactggccgtcataccgctggcacccacggtgctccagcagaacgaggaaccacgtcaacagcttacgggagaggagacaagaaattcaacgcacactcaacgtgaagaagtggaggacgtttcgagagaggacgcgagagaagggaatgatgggagccgagcaagtggaaacgacgagagaaggaataatgcgggaagatatgatgatcacgaggttcaagagccgcaggtcacttatccagcgggacaaggagaactgaacaggaggtcacaggaggagaacgaggaaggtggaccgtgtgaatcgccgccaatgacgacaaatacgctgaccgtggcctgtccgccccgcgaacccccgcatcgtgccctgtttcgtctatgcttaggactgtgggtctcgagctacctggttcgacggcccatgacgatttagaatacaccgagccattcctttatttcccccccccccatccccggtcgcttatgcgtgtcaaacactaccaataaagataatctgccaatagcaccttatatataatatgtggtcgcgtgtggtctttttaaggagccctgaaacacagacaggtatgggcggtggccggctgccgccgctgtggctgccgctactgatcgcctggagcgagtggggcaactgctgcctcgatgcgcctccggtggtgcgttcgccctgtctgcagccggtgcgcgaccgcaaccgcgagcggaacccgggctcaccgcagttgctgccttacggcgaccgtctggaggtggcctgcatcttccccgcgcacgactggccagaggtctctatccgagtccacctctgctactggcccgagatcgtgcgttcgctggtggtggacgcacgcagcggtcaggtgttacacaacgacgccagctgttacatcgccggcgggcgctggcgttttgaggacggcggcgcggcgcagcggctgagcctctcgtttcgtctcatcaccgagaccgcgggcacctacacctgcgtgctgggcaacgagacccacagcctggcgaccgagaccacggcgctggtggccgacgtgcacgacctgcgccactcggaccgctcctgcgacctggctttcggatcgcgctcacagacgcggtacctgtggacgcccgatccctccaggttgcgcagtataaactgcggttgggagggtgaacggcaccgcgtagtccactacatccccggcacctcgggtctgctgccctcgtgcgaggaggacgagcgcgaactgtgcgtgcccttcatcagccatagcatcgccgacaacaactgcagccgccggcatcgagtagacggcgctaggcggcgctatcatctgcggagggattactggctgacggatccgaagatcgggctgctggccgcgggatcggtggccctgacctccctctgccacctgctgtgctactggtgttccgaatcgtaccggcgcctgaacaccgaagaggaaaacgaggcggcggaggaaactgccgcgggagaagcctctgcggtagcggcggcggccgtctctgaggaagagcagcagcgggagtaaacggggagagccatgaagcggatgattcgcagtcacggcaggaaaacggaatgtcagatgacgggcgccggcgagcgacgcggctccgccgtcggtgcgctcatctgcgacagcggtacccgacgcggcagcggcgccaacgaacgccgcgactccgacgtcggtcccatcgcccacagtagcggtaccagacgcggttcggcaaatgaaacgtccgcctgtacgcggaccgatcaccagaaggcggacattgggctgtggttcatgtttctgttttttggactgtgttcgtggttagcgatgcggtatcgcgcacaataaattttgaatccatatcaaggaacgcgtgttttgtattttattgggaatattggcggggataaaccggtttcggatgtttacccttaatcttaccggggacctcgttgtcctctcccccttcttcctcggacaccgggcttcatgctgacgtaggtaccgactggggtcaaaagcctgggtacttatggggagcgcgcacaaaggaccgtcaggcgccggcatggagcgtcgccgaggtacggtaccgctgggatgggtgttttttattctttgcttatctgcctcttccccgtgtgctgttgacctgggtagcaagtcctcaaactctacctgccgcttgaatgtgacggagttggcctcgatccgtcctggggaaacgtggacgttacacggaatgtgtatctctatctgctactacgagaatgtgaccgaggacgagatcatcggcgtggcttttacttggcagcataacgagtctgtggttgacctgtggttgtaccagaacgatacggtgatccgcaatttcagcgacatcaccaccaacatcttgcaagacggactgaaaatgcgaaccgtccctgtgactaaactgtacaccagccgcatggtcactaatcttaccgtgggccgttatgactgtttacgctgcgagaacggtacgatgaaaataatcgagcgcctccacgtccgattgggctcgctatatccgagaccgcccggatccgggctcgccaaacacccctccgtaagagccgacgaggaactgtccgcgaccttggcgagagacatcgtgttggtctcggccatcactctgttcttcttcttgctggccctacggatcccccagcgactgtgtcagcggctgcgcattcgcctgccgcatcgataccagcggttacgcaccgaggactgaacggataaccgcaaaggccacgtgcaacgttcacgctgctataagaaggccatgtcccccgtggacgggtctctttgacacgagcgcggcacgccgttgccacgagcatggatcacgcgctcctcacacacttcgtcggccggccccgtcactgtcggttggaaatgttgattctggacgaacaggtgtctaagagatcctgggacaccacggtttaccacaggcgccgcaaacatctacctcgacgtcgcgctccgtgcggcccccagaggcccgccgagattcccaaaagaagaaaaaaggcggccgtccttctgttttggcacgatttgtgctggctgtttcgacgacttttctttcctcgggaggactcggagccactgatgtcggatccggcacggtctcccgaagaggaggagtaaacaacacacggctaagaggatacatcatcaaagaagataggaggggtcaaaacgcggactgaaagtatataacgccgatcatgtccgaggaactgttaataaaacgccatgatgacaatgtggtgtctgacgttgtttgtgctgtggatgttgagagtggtgggaatgcacgtgttgcgttacgggtacacggggattttcgatgatacatcgcatatgacgttgaccgttgtggggatttttgacgggcaacacttttttacctatcacgttaattccagcgataaagcgtcaagtcgggccaacggtaccatttcttggatggctaacgtctcggcggcctaccccacctacctggacggggaaagagccaaaggtgaccttatttttaaccaaaccgagcaaaacctgttagagctggaaattgcgttgggttaccggtcacagagcgtgctgacgtggacgcacgagtgtaataccacggaaaacggtagttttgtagccggttacgagggatttgggtgggacggggaaactttaatggagctcaaggataacctgacactatggacgggccccaattacgaaattagttggttgaagcaaaacaaaacgtacatcgacggtaaaattaaaaacatcagcgagggggatactacaatacaaaggaactatctcaagggtaattgcactcaatggtccgtcatttatagcgggtttcaaacccccgtcacccacccagtggtaaagggcggtgtccgaaaccagaatgacaacagagctgaagcattctgtacatcttacgggttctttccaggggaaattaatattacttttatccattacggtaataaggcgcccgatgatagcgagcctcaatgcaatccgctacttcccaccttcgatgggactttccatcagggatgttacgtagccatcttttgcaatcaaaactacacctgccgcgttacacacggtaattggacggtggaaatccccatcagcgttacctcacctgacgacagttcctcgggggaggtccctgatcacccgacagctaacaaacgctataacaccatgaccatcagcagtgtcctcctagccctgcttttatgcgctttgctattcgcgttcctgcactactttaccaccttgaaacaatacctacgtaacctggcctttgcgtggcgctatcgcaaggtccggtcgtcatgaccagcaacgccctgtatgagctgtttcgacgtcggttaccgcgtgcccccgtcaacacggtcatgtttctcacgcgacgcactcgtgatgggttctgcggtcggttgacgtccatcgccacgaattcccactacactatgttcgtgttagatcacggatccgtgcgcatcgagcgaccgagtcagtcagaagtggattgcgccagtttaatggaaacgctgaagcggattcggttacgaaattcgtgggtagcgtcagaagacgagctagatgtgagtcgcagggacgcgtgacacgaaacgcgttcaggattaacgtaggttttcgaaataacctacgtccgtgagtgacgcggtttcgtgttgaaacccgcgcccgcttctcacggtggtttatgatgaaaccggcgttgcggatccacgcgggttcctcattcaacctgcgaaaagaggaagttgcggtaaaaccacgtcaataaagacgtcaatgacacctcaatgttgcgttggaacggtctttatatatacaaacgccgttatgatcagtgtccggcaagatgctcgggatacgggctatgctggtgatgctggattactactggatacagttgataacgaacaatggcactcgaagcaacaataccgataccatctttgtatctctccttaccgggcccaacggagttactcgcacagccatcggaggtctgtattcaaactacaccaacttaactggagcatttggcttcacttcaacaaatatgtcagcaaccaactcttccgctgaggataattggagcgtaaccaacctgacggagagttgcatcaaccgcggtgagtcctatgtgactaccatctggcttctggactgcactaaaaacgatacttattggtactatggaaatgcctacaatcatacatgtgaaggtacaatttcgggatatctcctgggcatgtgcaagctatggaaaagttgggtcaataatattacttcttataacactgtcagagtcgaatcgctgggaaatgaaacacggtgcatgctgctccctagacagtatactctcaacgccacggtggaatggtacaacaaatctgaaggtgacgtaccagaagaattcatggactatgttatcctgacccccttggctgtgcttacatgcggactgcaggaagcttatatactcgacaaaggtcgtagatacatgtatttgttttccgtgtcctgcgtgggaatcacaggtaccgtatctattatactcgtctccctatcgctgctcatcctcatctgttactatcgctgtggccggcttctgatatgcccacgcggctttgaactcttgccagaattcactgaggaagaggaggaaaaagaaaaattgttaacgcataatgacattgaagtccaagtgcctattcgcacgcggcgactactcgtcccttggatccgggagagcaaaatgtgggtactaccacccccgttgcctccacgacctccccacttaatagaattcccgccgtctcctccgtcatcgcctgggcccatgcacatggtggtctgcatgccagcatgacgaactttggactctgagccccaagcggtacgaactacatattttccataaatctacactgaacttgagcacaaagatactgacaatagactggatatacagacttttatatgatccctgtacagatgtaaataaaatgcttttatttaaaactggtcccaatgttcttcgggaatcatggggtggggacgggggacgcggtagggagcaaaaccgggtacatgggggggaacatcgtccaacagtagcaccagcggattgggtaggggttgctgcggaggtcggtcgatgacgatgtcgatctccatcggcagatccggcaacatctcttcatctccctcaccgaccagcactcggcgctgttctggatgtatatgattctggaaaagcctccgacgagctcgcggcgcgtagaaagccaagcggcgcaagggccggcgagcccgaaagtccatgcgcacagatggcatgagtccttgagtgacggtggtgagctggggaacagggctacctcccatcgcgacggtgacagtggatccatgagagaggcgccgcacgctgcatggctaaataccgtgaatcccctgacgtcgtctttcgtcccgaacgcgtcatgttgggggcgaggcgtaaaccgtcgaggttgaaaaaccgcgtatctgcgacccgtccggactacgttgttttttagaagcggccacatgacctcgagatgtcgtcacccaaggtatttaacggcacacagccagacgcgttcgtcagcagcgacgccgacaagacctcagcatggctcggaggctatggatcttgagcttactagccgtgaccttgacggtggctttggcggcaccttctcagaaatcgaagcgcaggtaaacggaatctggggaattcaacacaggtaagaaatataaaaaaataacgtgattgtgaacgcggttatcgtgtttttgcagcgtgacggtggaacaacccagtaccagcactaactccgatggtaataccacccccagcaagaacgtaactctcagtcagggggggtccaccaccgacggagatgaagattactccgggggagactatgacgttttgattacggatacagatggaggtaaccatcagcaaccacaagagaagaccgacgaacacaagggagaacacaccaaagaaaatgaaaagacccagtagcagcagcagatcccaagggttaaagaccatgttgactattttgttttttattaaaaagctgtaaggttttgctctaaaaacaccccgcctccggtcttttttcttttgtattcggcacgcgaaacacggtttcttcccatagcctgtctaactagccttcccgtgagagtttatgaacatgtatctcaccagaatgctagtttgtagaggctatgcgggatgctgcggcggcgcgaccttccctctccacccagccccgtcaaaacacacgcgactcgagcggttcgtatgaaaaataaaaaacagctttttatttacaggaacggggaaaaaaaaggcacacggtccgtgggagacgcgggttcacgcgtcgtcaaaaagttggtggtccactccgtaaggacaggtaggcttatttagcttccgcatgctcctggttccgtaataaatgccgttttcgtggcagcgtgtcatgccgcgagtcacaaactccatcaaactgtcggccacgatgcaaacgtgctgattgttggcagcaaagacgcgcatacagtcgtccacgaagaggttgatcacgtcgtaggggctcaccaaccagcctaaaggttccacgtggttactgccgaccatgaccctccagtcgttaatctcgctccagtcgtacagccgaatcgtggagacgcgaatgacgctgtaatcacccatgaccatgagtcggccgcgatacgtagcacgccactgcgcgaacgcgtggatgtgcatgcagccggccagcgctctaagcgaggcggtgtgcggcagctcctctgggacggtgatgaagttgcagcgtcgcaaaccgatgttgagaaattcagtgatgctctcggccacaaaggtcaacgagtcagagtagatgtggtcggtccacaggtacatggcgcccgaggcgcccaggtacagttcagacggcacgttgtgatcgcccttgtgtttaagaaagttgtaggtgcagatgctgccgacgaaacgcagcggctcggggcagcagaggtagctggccagacgctgtgcatcccgtccttcgtcgcgcaccaagcgccagcgacgccggataacgaggcagcggtctttgggccagaccagggccacgcgttgcccgggtttccacggtcgcgacgtcttaggaggcctccagcggtcgagcagattgagaaaacagtccttgattaccgacatcgcggtcgcgcgtcggtggacaaaaagaaatcgggccgatccagaaaaaaaaaaaacgacagcgaaacaccgccgtgctcgagcgaagggtggcggagggccagaagaggcggccttgacgacgttggcagcgaaaaaattggcacgcgagtcaaacgggaagtagcgtcggtgttttatgccccaagcagcgtcgtcgtcactcgtggcgtcacagtcaacggtgctgacgtcctttggggcagtcgggcacgcgatcgtagatgccgttgtggccgctgaaacgtcggttttcaaacagcaggttaagtcccagacacatgaacgtgttcagattatctcccacccggatgtagcggtcgtcgcgcacgtcgcaggcgtagacggccccggtataggcgacgacgatggggataaggtcgacgggccagcgcaggtgaggaaagggcgcgttctcgcccttgaggctgacggttcccaggccgagaacgcgcattccgaaagcggttttgatgttgcgcagcaagtgaccgccttccacgctgttttcgaaacacctgaggttgcatagacgcagttccgttcccggcgggaacgtcaatggcatgaactgcccgtggtggcggatgatgaatcgtgccatggtatccaaaccgaggctccaggcgcgcaacagcgggcgaaagtagcgcttaaccaacgacgaggtcaggtagcgcatgcagtgcagggtttcgacggcgcgcagcccgacgcgcgcaaactccatgaggttgcgggccaggtagtagacggcggtgtcctcgcgtacatagcaaaagacatagccctcgtccgagatgaggcacacggcggtcttcttctgctgatccggcgacaacacggcctcgttcacgaagcgacccacgaaggccaggcgcgtctcgcagcacaggtagtgactccaagctttcacgtcctccggtttgaagtcctcgtccgtctcgatctcctgcagcactaggttccagcccggcggccagaccacgggcaacacctggcctgcgttgatgcgcacgtaagcttccagacagcccaggccgaactcggccgtgagcgccaggctagccagatcgctcatgtgacgcgccgagtcggtgggcgagcccgggggcccgtcgcacaccacgctccgtcttcttgtcctcaccgcggccagcgtggcgaggacactttccgcgcccgaggctgtatcttcggtttgcccgccggagccggccctcactatataacgtcccgcccgggtctcctccatgtatgcaggtaagcaactgagccgaacgcacctcagcagacgagaggatgtcgtcgcggcgtcgcagctcgtcacgtcgctctggcgaaccctcgacggtgatttatatcccctcgagcaacgaggacacgccggcggatgaggaggcggaggacagcgttttcacgagcacgcgggcgcgcagcgccacggaagatctggatcgcatggaggccggtttgtcgccctacagcgtctcctcggacgctccgtcgtccttcgagctcgtgcgcgagaccggcggcaccggcgccgccaagaaaccgagcgaaaagaaacgatcgtcgtcacgtcggcaaccgcagatcgcagcgggcgcgcctcggggctcgccggcgacacccaaggccggcaagtcgcctaaagtctcgcgaccgcctagtgtgccctcgctgcccgagaacggcgccggcggcggtggcgacgataacagcagcagcggcggtagcagcagtcgcaccaccagtaacagtagcagaagcaccagtcccgtggcgccaggtgagccgtccgctgccgagggcgatgagttttccttctgtgacagcgacatcgaagactttgagcgcgaatgttaccgggtcagcgtggccgacaatctgggcttcgagcccagcgtggtcgcgccgcagcacgtcgagtatctcaaattcgtgctgcaagactttgacgtgcagcacctccgccgcctcaacgaatgcatacccatgccggccttcgcgctcaccagcctcgtcgaccccgtcttaaacaacgtagcgcctggcgagcgcgatctcacgcgtcggataatcacgcacgcggtgatcatcaactattactacgtggcgcaaaagaaagcgcgccacatggtggaggccatacggaccaccgtgcgggacgacacggtacgccgggtagccgcgcaggtcaacaaccagagccgttcggggcgtgcggccgcgctagcgcttcactttctcacgtcacgaaaaggagtgacggacggtcagtacgccacgtctctgcggcggctggacgaagagctgcggcatcgcggcacgcccgaatcgccgcggctcaccgaggtctaccagacgctacgcgattacaacgtgctcttctataccgcccactacacctcgcgcggcgcgctctacctctatcggcaaaacctgcagcggctcaacgaaaaccaccggggcatgctccggctgctttcggtcgaagagatatgcgaagagcacacgctcaacgatctggcgttcctagtaggcgtcgagcttatgatcacgcactttcaacgcaccattcgcgtgctgcgctgctatctccagcaccagctgcagagcatctcggagctgtgttacctcatctatgtacaactgccgtcgctgcgcgaagactacgcgcagcttagtgacgtgctctactgggccgtcagtcaaaactacgactacgcgctctacgcgagcacgccggcgttgtttgactttttacgcgtcgtgcgtcagcaggacgccttcatttgcaccgactacgtgtactgcgccctgcgtctgctggcctgtcccgacagacctattatcggtgacaccggcggcagcagtagctcccaacgcctcgtaggcgagtttatggtgcgcgatccgctgttgcgcgacccgcgcgccacccacctgcgccagaaactcatcacccgcgacatatgcgtggcgcggttgcaagcgcagccctcgagtcgacacattccggtcgaacacacgggtgtctcctccgtcaccctgctcaagatctttagccaggtcccccccgacgaacgcgaagaagacacgttacgcgagatggctcttaaagcgtttatggaagcgaacggtaatcaccccgaacaaatctgccgatccccaccacccccgctgccaccgcgcgactatcctcaacgcgacgagcgggaccgtcaccgtcgcgaccgccgcgacagcggggaatactgttgctgatggtgggacgaaacagcagggcggaacagtttatgatagaaagtcacaggaaagtatgtgttgttttttttttaatgtaccaagaataaaaagtgcgtctacgaccaaagcggtgtgtggacgctcgtcctctgtcttctccggtttttttttatgtgtgtgtttttcttttccttcctattttgttacggcaacagcgctgatggcacgttgccggcttcgaacatcgcgtcggtgatttcttgcttgcccggcgtcacacggtgacgcagcagcgcgcggctcacgtagcaggccgactcgcggatgacctggccgtcggcgtcgcgtcgcaggcccgagcggttgccgtgacgcagtcggccctgcgcggcgcgctccacgtcttcaaagtagctgtgtagcaggccgcgctccagcagctgcggcagcgagtcggcggcgcgcaccacaaagttctcacggctgatctcgtagcacagcacgctgccgtcggctgccacgccggccacgctgcggtcccaactgaagaggttggcgagtccgatggtgccgatgacgcgcaactgaccctgggtcaccaccagcagcttccagtattctacgtcgcgcggggtgaggatggtctcctccacgtcgcagacaaacaacgtgtagccgcgcggatagggcagatccaggtggcgaccgcgctggcggcgcataaaatcgtctaaattcaaaccgccgtcgggtgcgcgcctgctcgtcatcgccgcgcctcgtcggtcgatgaccccacggtgcttataacgcgccgccgcggcttcatgtggcgtgacctccgacctcgtgaggccgaaaacggcgtacatgaagacgctcaaacttttgaatgtgggcccggtagcgcaccgagggccccggggcggcgacgacggcgggtccgagttccagcggggccttgcggcggcagcggttggcgtggttgctcagctcggcgtccgagagcgccgagctgaactgcggcagccgcgtgcgatcctgcggcgcgtccccgtgtcgcagcgagtgccagagcaggcgctggacgcgcgccgtctcgggcgtcggcggcgcgcgacagccccggcgcagcttgaaaacgtgcaggcacagcagctcgcgcttgatgcgcagcgacacgctgcggtagtcgggaatccgctgcaccagctcgagaaagtcgcagaaggtctccacgaacgtgtcctcggtgaagcgaatgcgcttcagatcgtggacgtgtttgcgaaaccgcgacagttctcgacgttgcacggggttctgagcgagtcccttgcgcagcagcgcagcctcgcctttaaacagcctgatgagccgctgcacgtccccgctcaacatacgtatacacgccgtgtactcgtgacgtatactggcgcgcagcagccgaatgatacgcagggccagcacggcgttggaggccaggtacatggcgtagccgcgacgcgggttggcacaggcccagcccgcggggagcagaaagtagtcgtcgaccagcgtctgcgaccagtcggcgaagcccaggtcacgtgatacgctgtcctggacgcgggccacgtcgccggctgtgaggtggcggatcgccggcaggtgaaacgcgcccaggtgtcgattgcgctccagcctcagctcggcgtgctccaaacgggaatggtgggacgccaccgcggagggcgacaaagaggagtggtcgccgccgccgtagttaccgttgtgattaccgccgtcgtcgcgcccgtcgccgcactcgcaaaaggccgcgtagaggtccttcaacgccgcttcggctcgcgccataaacgtggcgtggaaaaaaacggcggcgcggtgcgtccggtacttgacgggcaacccgcggcacagggccgccggcaggcagcggccgatgagttcgcgctcctcgggctccagaaacaggcacagggtgccgtccaggcgcaggtacagctcctcggtcatcgagcatagctgccgcaagtaatgggtgcgcgtcccaaaggtcttgtaatcgagcaacgtgcacaccacgtattgccccgtggccacggccagagcgatgcgtttggcggcgcgactgatctctggcaagtactgcgcctcgtgcaccagacggcggaaagcgccggcgttgagccagcgaaaatgctgcggatcgggcggcaagggcacgcctcgaagcgcggcccagacagcgaggtccgactcgagcgtcagaccgcggatgtcgtacttgccgtgcgccgtagcgcaggctgaatggaccagacagctgcggcgaatgtacaccatggcgtgcttgggatgtttgggcgccggcgttttctttttctgaccgccggcggccgccagatcctcgggcgtgcgacacaacaggccggcgcgcacagcctcctgtcgattacgaatcggcgtcaggtaggcgcgcaggaactggtgacaaaactcctcatcatcacgacagtcgtcgagatactcgtacgtggtgagcggatcgcgaaataggcgctcgtcaccgtcgtcatggtcttctttagcctgctcctccggctgctgggttggcggtggaggcggcggctgatccacggggttcatgactgagaggaagaagaaggtggcggcgaagcgacgcggagcgacggcggtaaagccagacaccggctatatagctagtcatcacagtctcctccttcacgacgcccccgtgccgctcacgctatccagcacgctacggcccgaaaacacgtactcgctgacgtcgtacgcgggcgatgtatggctgctcaccggtttcgcggcgacggttgcgctcgagtccaacggcgagaagcaaaaacgccgtgggcaacgaaaccagaaggagccctgacggataaaaccgcgcagcgtctcggccaacttaaccagcatcgtaccgtacagcagtacgtgaatgccgccgtgcgcgtccataaatacggctttgtttacgggttccatccatccgatgactacaaagtgagcctgttctagcacgccgatcacaaaattgttggcctcgtcggcctcggccacattccacgagccgaaagtgaaagtacaagcgggcgagccgcccaggcggattttgctaccggcgtggagctgacatacgcgcagcagattggcgcggtcgtgcagtatctgggagagttcgtacatgcccgcgaaggtgtgcttaaaccacgcgccctctacgatttcatccacgtaatcgcgctcaaagaagctatacacggcaaagaggccgttctcaaaaaactcgccgaacgagagccccagcacgtacaccttgtcctcgccgggcaggtacgcaaaggcgtgcccgtgcccggagacccagatctcgggcgccgtgtttgcgtccggcacgcattcgtacacactgacgaggccgataaagtacaagcggccagcctggcgcaggcacgagaagcgccggtaggtcttgtgatcgcgcaccaccccaaagtactgagtgtcgcccagcatgatgccgtgcagcggcggccagcacagcgggagccaacgacccgccgtggcgcgcacgtagcgctgcaggtgaaccccgctcgcacgctcgcgcggcttcgggcgcttgtgggtccaggcatcacgcagaccgcgccagatgctgctgaacttgggctgcccgcgcagatagagcgacgagagcgagtcaaagtagcccacgacgagcctgtcgggagacacaagagcgcgaaaatcaaacctagagcgacgacggtgaaaaaaccgattataagcgcgtgtctcaaacacgctactttcggttataaaaacaccgtcgccctatttctgggcgtgtgtacactgatgactcacctacgctttttgaacggcagtctcagctcgggattggcctcgtacagcgagctgcggtccacggggccgatgctctcgtagcgaaagtcgtcgatgagcagcgccagccccacgcgcacgaagcccctgaggtcgcgcgccagccgcaccaacttatcctgccccaccagcgccgcgtacacggtacccgtgtcgccgcagagaatccgcacgcggtgaaagaaggtcttgtcctcggcgccctcgatctcgcccagcggcatgacgggctcgcgcgtgtacaacgaacgttgaaagcggcgcagcatcgaggccgagagccccagatcgcgcgccgtgcgcagcaccagggaatgcttctcgggccagatgagggtcagctgcgcctcgcgatgcgcctctacgtaggcgcagcgagcggcggtgtcctcgcaagccagcaactcgcggaaagccagcagcgaacgtaggtagcggccgcgagcggaggcgcgcgagcggcggcacagctcggcccgatgatcgggatgcaccaagggcacgttgggttgcagacgcgcgcagatggattcgtgcaccgggtcgcagcggatcatgcccttggcaaaaaatccggccagatccgaggccaactcgtacaggcagtcctcttgcgcgtcgtaggcgaacacggcgccgtacgcgtccacgaacacctggtaccggcaggtggcgtgcgagaccgtgccaatgagatgcagagctcggaattcgccgaaaaagtcgttctggcagtgctccagatcgatctcggtcagcgagtgcggcgaatgctcgcccccgaccacgtagatgcactgcgagggccagcccagcgacacgcacgagccctcgaagcgccgcaagtaacgccgcaggccctcatagtcgcgtcgcacgcacaggtcggccaagtcgcgcgtgcaaaagacctcgggtaccaagcagcgtttgcgacgcggccgacgcgcgtgcccgggcagaggaggaaggcgcgacggcggcgacgacgaggaggaagacgccgtggccgccgagcagcccttgcgacggccggacatgccggcagtccgcgacgatccacaggagacaaaaaagcagaagcagcagtagcctcggcgacccgctccaccccgtcctccacacgctcagccgcgactgaacgccggggcgcgccgctacttgggtttttatagccatctgccccccgtctcgggcacccgggagcgatctacggagacctgacagcagttgggcaacacaagatagggaaatacaaagacacttttaataaaaaacgagactactttgtgtgtgtgctccgtaaactgtttattctccccctccgcttcgctctggatgggctccgggcccgtcaacacgcgactcgcgcggcaaaaggcacgctgttgacggcgcgagagcccgtcgtgatagtccatcatgccccggagatcgtgcacaaagcagctgtcgccgcgcagaaaccgacgcagcgtctccacgtgctgcagctgccggcgcgtatcaggagccgtcatcgctgatgtcgtcatcgccctgacaggcgcgtagatggctccgcgagatcacgcgcgttttcaaccgccgtgacacatcaggtccatcttgagctggcgccgggcctcgcgcaggtgtcgcacgcgttgtgagcgggaggcgagttcggcttcttgctcgaactcctgctgctcactgtccgagagggtgcgataaaaggcggcaaagtcctccaagtcggctacatgcgccctgggtctgacgctccaaagcgtacgcagtctgatgaagcggacccatcgagcgtcacggcacgccgtcttgaacgcggggcccgggaagaggttcttctccccggcgcgctcgggccggcgaggccgacgcggtttatatacaccgtctcggacggcgggacgccgagcccgcgccgcggccgctcatccggagacggcggaaaccgcggcgccggaggaaacggggaccggcaacgacggcggtggcggcgaccagattatgggggaaaaacccacgcttgtaaccctgttgaccgtcgccgtgtcgtcgccgccaccgtcgtcgccgctgccgcttgtcagcttcacggagctgctgttaccgccgccgtccgtcgccgccgccgcggtggcggcgacagcgacgagcgaggtgggcgagaaaaccgcggagcaagaggtagcggctgcgggtccggagaccgggaatgagagaagagaaaacagggagaacgaaggaggggagacgaggacgacagacaccaccgcggtcaaaaggtcgcacgacggtatccctcgccaactagcagagcgcctgcggctgtgccgccacatggaccccgagcaggactatcgtctgccggcgcaggacgtggtgacctcgtggatcgaagcgctacgcgacgcggaccgcgataactacggtcgctgcgtgcgccacgctaagattcaccgttcggcctcgcacctgacggcctacgaatcgtacttggtgtccatcaccgagcagtacaacacggcctcgaacgtgacggagaaagcttcgtacgtgcagggctgcatctttctctcgtttcccgtcatttacaacaacacgcagggctgcggctacaagtacgactggtccaacgtggtgacgcccaaggcggcgtacgccgagcttttctttctgctctgctccaccagcgagagctccgtggtgctgcaaccgctcatcaccaagggcgggctctgctcgtccatggcggtttacgacgaggaaaccatgcggcagtcgcaggcggtgcagatcggttttctgcacacacaactggtcatggtgcccttcgtgccgcacgcctgcccgcattacgccgtgcctttcacgacgccgggaaagccgggctgcggcggtgctccgagcggcgttgcggggttggaggaggcggcgccctttggacgggtcagcgtcacgcggcatggcgcgacgctgctgtgtcgcgtggaccatctgacctggatcagtaagcgcgtaaccacgtacggacacaaaaaaattacgcgctacctcgcgcagttccgcggcacgatggacgacgacgaggcggcgctacccggtgaggacgaagcgtggatcgcgtccaaaaacgtgcagtacgaattcatgggtctcattttcaccgtcaacgtggattcactatgcgtggacgcggaacagcgccaactgctgggcaccgtggccacctccttctgtcaccgcgtctcggacaagatcacggcgcgcaacatgccgcgcgccttttccttctacctgctgacgagcgcgcagcgcgggtacgacctgcgatttagccgcaacccgtcactcttttttagcggcgacgcgctcaactgtccgcttctcaatgagcccaacgtgttttcgctcacggtgcacgcgccttacgatatccacttcggggtgcaaccgcggcagacggtggagttggacttgcgctacgtgcagatcacagaccggtgtttcttggtggccaacttgccacacgaggacgccttttacacggggctcagcgtgtggcgcggtggcgagccgctcaaagtcacgctgtggacgcgcacgcgttccatcgtgatcccgcagggcacccccatcgccacgttgtatcaaatcaccgagggcgacggtaacgtgtactcgtacaaccaccacacggtgtttcggcagatgcacgccgccggagcaaccacgttctttctgggcgacatgcaattgcccgcggacaactttctcacgtctccccatccctgaccctccgtccgtcctcctttcccgacacgtcactatccgatggtttcattaaaaagtacgtctgcgtgtgtgtttcttaattattcctccgtgttcttaatcttctcgatcttttggaggatgttctgcacggcgtccgacggcgttttggcgccccccatgccggcagaacccggttgcggccccgtaccgctcttctggggcgacgataggtcgaaagccaccgttttcatgcccgtcgtgctcttgacgggggaacctacggcggcggttcccgtcgagcggcgtgattgcaaagccgcgctcgcccccggtttcaggatggagggagaggccacaggcggcgcattcgatacgctgcttttggccgtagacgacggtgggtaaacggtggttaccgcgggatacgtcggcgtggtcgaggcggcccggctggtgccggacaggcgacccggcgcgctaccgctcacggggaccgagggcggtcgacctaccaccgctttgccgcccaaagtaggtttcaaggaaggaacaacaccgacacggccgccccggcctttcaccggagacgggggggcactcttggccggggacggagaggctgacgaaagcatggacagcggcgatgtggcgggggacacgacatcatcctccgtgggcgacaaaacggacgccgaagctgacggctgtcgagccgaagcggaagaggttcccgcgccagaagtcacgttccttgatgacgtcgttttagacgaagccggttgaggttgcaacagcgtggcgggtaccgtcgacggcgtgcccgacacctgtttctctagccttccctgaaccggtgtcgacgtcaccgtctgcgctcgggcggacgcgtgcggcgtcgcgactcgcttgcccagcaccggtttctggctcgtggatgtcgtcgtcattggagacgataacttagctttacgtattctggacggcgtcgactgctcgggcgtctgactgggaggcgaaatgacgtcgttgtaatcggacgacggtgttgtgtgtcccaggctgacgacggagccggtgtccgaggagtcgtcgtcttcctcctcgctgtcttcgaccggtgactctgcagtttggtcccttaaagcccaaacctcatcagcggcgttctgagacgctgtttgtgtcaccgcggcgcgtggagtcgacggcctccgaggggtggtggacacggtgttttgagaagccgtggaagtcgtaggcatcctgaagggattgtgagccaggtgaggattcttgagggcccacgcgcgttcgcgcggccagttggcggggttcatatccccgggcaacggcgccgtcggagcccagggcgagttaccgttgaccggggtttgggtacccgcgaaggtaggtgtcggggccggagcgggggccgtggaaggattgacaggcgtcggcgtgaggatggcagtgccggcgccagcagggacgttaactccggcgccgaacgtcaacgtcggttgctcgaacttgtacgcggtggtgacgggcggtttggcactcgtctcggtatccgtgatgtccaccagcgtgtcggtgaaacgcggatcttgacggttggggggatagccatccgagctgtcggaatcctcgtcgcccgagaaaagatcccctctggtctccgtgagcggcctcacgtcccacgcgctgtcccgacggacccttcccgggctggccttggtcacctgcggggagacgagactgaaagccgcgtgacgctgttgttgctgcgggatgttcaagggaccgctggtcggtttctgactgcccgaggataacaggccgctgaaaacgctggaaacaccgccaccactagcgacgcccttgccgctagttcccggtttcttgatgggcgtaaagatgtttttctcgtcatcgtcatcgtcgtcgtcctcatcggcactggagccaaagagcctccgggaggcgctcggtttacgtgccgggggcggtggttgctgttgacgttgctgcaggttctgctgcctctcctcccaagccttcagctgctgtttctcacgctgcaccacctcgtcgtccacccgtttctgccgctcgcgacgcttttcctcttcgtcgtaatagccgacggccgccgaacgggcggcgtgggcgtcggcggccggtgccagagaaccatgggcctcgaagcggaacggtttgtgtcccttccagggactggcgatccagctccagccgtccagcggctgcgtggggacatgtttcttgggtaccgacgagaaggccgaaccgccgccgagcgagaggagattggcgtcatcatcaaactccaacgacggcgagcgcgcgcccaaaaaggtgtgcgccgactgcgggaagctgtccacgtagatgtcaaagtcctcgatgagcagctccagcagcgtgtcggccgagtcgccgttttccacggcgtgcttgaggatattgcgacagtagttggaatcaaaggaaaggcacatacgcagctccttgaccagcagcttgcagcgctcctgaatgcgcgccagacatttgcgctccagctcctcccaagacctacgcacgttcatgatgagacggcccgtgtacacgagcttgttgacggcgttgaccagcgccgtgttggcgtgccggtccaggttaaggtcgagcggtttcacacagaacatgttacggcgcacaccctccaggttttcttcaatgcgctgcacctccgtatccttgaggtgcacaaaggcgatgggttccgtctggccgatggctgtgaccagcgtctcgcgcaccgacatcttggccagaatgaccgcgcttacgagcgcgcgctcgacgatctcggcatcgtggcgcacgtccgtatcgaattcggtatggtctagcacagccaggtgatcgcgcgccttaccacgatcaccgaacgggtaagtgtagccgcgacgcgccacggccgcgcaacgcacctcgaactcctcgagcaccgaggagaggtcggggttgtggaaacgcagctcgcggtagtatcccaaccaaagcatgagctcgttgaacagcaccgtacgccggtgcaggcgtttttcgccacattttttcaggatcttggggtgtgcctcgagatccacgtcgggcttttgcgtgagatggcgcagaaagttgaccagggctaccacatcgcgccgctgtagaccgataaactgcaaactcatgctggcttttctccagaacccggaagcgtcgtcgccccggactgcgcccgcggtctgctattcgcccgcgatggacaccatcatccacaactcggtgagcgtcccacccaaagggagggggggtagtttaatagcggaggcggatacgcggttttcttttaagcgccgctgacttgtttcttctgttttttcgccccgtgtgctgttccgcccagacccgcaacaacactcctccgcacatcaatgacacttgcaacatgacagggccgctattcgccattcgaaccaccgaagccgtactcaacacattcatcatcttcgtgggcggtccacttaacgccatagtgttgatcacgcagctgctcacgaatcgcgtgcttggctattcgacgcccaccatttacatgaccaacctctactctactaattttctcacgcttactgtgctaccctttatcgtactcagcaaccagtggctgttgccggccggcgtggcctcgtgtaaatttctatcggtgatctactactcaagctgcacagtgggctttgccaccgtagctttgatcgccgccgatcgttatcgcgtccttcataaacgaacatacgcacgccaatcataccgttcaacctatatgattttgctattgacatggctcgctggactaattttttccgtgcccgcagctgtttacaccacggtggtgatgcatcacgatgccaacgataccaataatactaatgggcacgccacctgtgtactgtacttcgtagctgaagaagtgcacacagtgctgctttcgtggaaagtgctgctgacgctggtatggggtgccgcacccgtgataatgatgacgtggttctacgcattcttctactcaaccgtacagcgcacgtcacagaaacaaaggagtcgtaccttaacctttgttagcgtgctactcatctccttcgtggcgctacagactccctacgtctctctcatgatcttcaacagttatgccacaaccgcctggcccatgcagtgtgaacacctcacactgcgacgcaccattggcacgctggcgcgtgtggtgccccacctacactgcctcattaatcccatcctgtacgcactgctgggtcatgactttctgcagcgcatgcggcagtgtttccgcggccagttgctggaccgccgcgctttcctgagatcgcagcagaatcagcgagctacagcggagacaaatctagcggctggcaacaattcacaatcagtggctacgtcattagaccccaatagcaaaaactgcaatcagcacgccaaacgcagcgtgtcttttaactttcccagcggtacgtggaaaggcggccagaaaaccgcgtccaacgacacatccacaaaaatcccccatcgactctcacaatcgcatcataacctcagcggggtatgagctttcctgttactttattcagaaagcaccagaacccgtcgccatttcccctcatatacggtacacgtccccctgatctgtcatcacggtacacagatttcgcccgactgcggacgccgacggccaatcgcgtggcgtaggagtggcgccccggcttcattataacgccacgtcggagcccctgcgcgccacaacgccgtccggcgcaacttctgtctcggcacggtacgataaaaacgacgtcccccgtcgacgttgttttctccgagcggtgatcgttcccgtccctatcctccctccgcggcccccacggcggcggcctgctcgcacggacctatactattaccgccccaccgccgtcgtcgtcatgaacttcatcatcaccacccgagacttctccaacgacgattcagtcctgcgagccgccgagatgcgtgacaacgtggcaggctcgatttccaaagcgtacaagggcacggtacgcgccgaaggcaagaagaagctgctgctgaagcacttgcccgtgccgcccggcggctgctcgcgccgcaacagcaacctcttcgttttctgcaccgaacgcgactaccgcaagttccaccagggcatcgcacagctcaagcgcgcgccggccgaactggacccccacgagatccagcaagtcacggccagtatccgctgccgcctgcagcccagtctccgcgagccgcccacgccggccgacgagctgcagacggctgtgtcgcgcgtgtgcgcgctcttcaaccagctggttttcacggcccagctgcgccactactgcgagcaccaggacaaggtggtgagctacgcgcgcgacgagttgaccaaacgctgcggcgaaaaatcggcgctgggcgtggaggtgcatcaactggtagccttgctgccacacgagcgccaccgcgaactgtgccacgtcctcatcggcttgttgcaccagacgccgcacatgtgggcgcgctccatccgtctcatcggacacctgcgccactacctgcagaacagcttcctacacctgttgatgaactcaggtttggatatcgcgcaagtcttcgacggctgttaccacagcgaggcctaccgcatgctcttccagatcggtcatacggactcggtgtcggcggccctggaactctcacacagcgcggcggccgggctgcccgaggccgatgagaacaacgacgagggagaggaggacgacgacgagctccgtcacagcgacccggcgccgcttcacgagtccaagaagccccgcaacgcccgtcgtccccgcacacgcatgccgcctcacgagcaaaagcccgaagaaaacgaggaggaagaagaggagctgtttccctcctgcaaggcaaccgcagcattcctgcgggcagaaccctccgtctccaacgacgacggcaacggcggcgaacgctgcgacacgctagcgaccgccctgcggcattgcgccgacgaagaagacggacctctagccagccagaccgctgtgcgggtcgccgcgaccccctcaccttcagtcaccccagcccttacccccgtcacgtcccccataaccccgttgtgtatttaacgtcactggagaacaataaagcgttgatttctcaagttccgctctggttttggtttcgttttcaaagggagccccatcatggcccaaggatcgcgagccccatcgggcccgccactgcccgttctccccgtggacgactggctcaactttcgggttgacctgtttggggacgagcaccggcgcctgctgctcgaaatgttgacccagggctgctccaactttgtggggctgctcaacttcggcgtgcccagccccgtatacgcgctggaggccctggtggacttccaggtgcgcaacgcttttatgaaggtaaagcccgtggcccaggagattatccgtatctgcatcctcgctaaccactaccgcaacagccgcgacgtgttgcgggacctgcgcacgcagctcgacgtgctgtactcggagccgcttaagacgcggctgcttagagggctcatccggctctgccgcgctgcgcaaaccggcgtcaagcccgaggacatcagcgtgcacctgggcgccgacgatgtgacattcggcgtgctaaaacgagcgctggtccggctgcaccgggtacgcgacgcgctggggctgcgcgcgtctcccgaggccgaggcgcgctatccgcgcctcaccacctacaacctgctgttccacccaccgcccttcaccacggtcgaggcggtggatctgtgcgccgagaacctgtccgacgtaacacaacgtcgcaaccgaccgctgcgctgcctcacctccatcaaacgcccgggctcacgcaccctggaggacgcactaaacgatatgtatctgttgttgacgctgcgacacttgcagctgcgacacgcgctggagctacaaatgatgcaggactgggtagtggaacgctgcaaccggctttgcgacgcgctttacttttgttacacgcaagcccccgagacgcggcagactttcgtcacgctggtgcgtgggctggaacttgcgcggcaacacagcagtccggccttccagccgatgctgtacaatctgttgcagctactgacgcaactgcacgaggccaacgtgtacctctgcccgggatatttacatttcagcgcgtacaagctgctgaaaaagatccaatcggtctcggacgcccgcgagcgcggcgagttcggggacgaggacgaagagcaggagaacgacggcgagccgcgcgaggcccagctcgatctcgaagccgatcccacggcgcgcgagggcgagctttttttcttctccaagaacctgtacggcaacggtgaggttttccgcgtgccagaacagcccagccgctacctgcgccgacgtatgttcgtggaacggcccgaaaccctgcagatcttctataacttccacgaaggcaagatcaccaccgagacgtatcacctccagcgcatctatagcatgatgatcgagggcgcctctcggcagacgggcctgacacccaagcgcttcatggaactcctcgacagagcgcctctgggccaggagtcggaacccgagatcacagaacatcgcgatttatttgccgatgtttttcgccgtcctgtgaccgacgcggcttcttcgtcgtccgcgtcttcgtcgtcgtcctcagcatctccgaattctgtttcgctgccgtctgccaggtcgtcatccacacgaaccaccacgcccgcgtccacgtacacctcggccgggacttcttctaccacgggtctcttgctctcctcttcttccttgtcgggatcgcacggcattagctccgcggacctggagcagccgccccggcaacgacgccgcatggtcagcgtgaccctcttttcgccctactcggtagcctacagccaccaccgacgtcaccgaagacgacgcagcccgccacccgcaccccgagggccggcccacacacgcttccagggacccgacagcatgccgagcactagctacggcagcgacgtcgaagacccgcgggacgatctggccgaaaacctacggcatctctgaacgcggtttttcctctttttctacgtgtctgtctcaggacgagacgtcgatatcaataaaaataccgtcgacgtggtttttttaacagtgtggttttctttattgactagcggagtacacagtttacgagtaaaaaagacagggaaaggttatataaaatgctgtattatatacaaaaacatgcacataaacagacgggaccaccgtgctcgtcatcctctcctcaatcagttgttcatgtaggcgtgtggcggggtgaggggcggcatgccgttggcggcgccgggaataatgtgccgtcgaccgacgtcgcacaccttgaaacgccgtcggcgcacgcagcggtcgcaggacgggatatcccagaggaagcccatgtaggtctcggggtcctcgtcgtgaaagcggtaggagagttcaaagtggtgcaacgagcccgtccgagctcgcagcttctggcgaacaccctccacgtcatcggtgcacaacgacagtgctgggctctcacacagggcctgaagctcctgcggccacaggtgcgtggccaggggcgagtccgtcgtcaccagtttgacgcagtgcatcaggttctcggtgatggcgtcgtacaggcgactctcagcctcctcgtgcgtcatcacgtttcgaggcagcgacagctcgtcgtcgtcatcctcgtcaaacatgatcatggggtcaggggtttttttgggatgttgacaggtgggtgtcttttccagacgcacgatggcctcacgccggccgctgaaacggtggtttcggtgtcccttctttcccatgacgcaggtgaacataaccacgtcctcggccaaacggtagacggcgtccatggcggggtcgtagccgtagacgacgccgaaagtgtccaccaagacgtactggcgtacgaggaactctttgcgttctggcacctcgtggcccagcgcgcccaacaactggtggtaacaggtgatgcgcggcacggtacggatcatgagctccatggtctggatgctgccgcccgcgcggacgacgctgaaggatgtttccttgaacttcataacctctgtgttgtgggtccagaaggcgaaatgggtgtcgggacactcatcgaaagggtcgtcgatggtgtaggaagcgtagccccgcttggtcacctcggccgacaggctctccacgtcaccgcggtagagcatgacggcgttccagtaatcgtcgtactgcaccatgggccgctggtagtcgcgcatagtgtggaagtggtcgcagtgacgaaagccatgccgcagaaagtccttcatggtggatgccagctcgtagacgcagtcgcgcaggtcatcgtagcagtagatgccgccgcgctgcccgatgagcacgatgagttggtagcgcataaagcccggaccctcgacgaagccaaaggggtgcaggtattcctgacagcacacgtaagcacctggtggagaaataagaaaaatccacgcacgttgaaaacacctggaaagaacgtgcccgagcgaacgtcctctttccaggtgtcttcaacgacgtggggcttaccttgcgaacagacggtgcccatcttgcccacgaagggccccagggcgttgcgcgaacggagctggatgaagcagcgttcgggccaggccacgtgcagccgggtgccgcattcctgctccagaaagtcgttgagaccgttaaagtccccggctcgaatggcgatgcagccgtaggccatcagcgtgtcccgtaggtcgtccatgacggactcctctaccttcgctcgccgacgctgcgcttctccagccaccgctgcggtcgacagactccttcgtccgccttcggagaactacggcgcggcggcacggcctttatagacactatcagcgttgacgtcagacgatccgatgaacgtcgttttttgtgctggaacttccctcgtcccgacaaatgtagcggaaatcttcaagcaaatcgcgacgaagtccgatgaggaggatgcaaaagaggctgagcaacgcgatgctgcccgccgccacagtacatatgctcaacaacgcccagtgtcccaacgcgcgacttttggctcggagcagagccgaacggcggtttctccacatgacagataacgtggtccagtacgtccatcctttgcattccggcgtccagacgggaagcgttgtcatgttagttcccgtaaaggtcgtgttttgtcttgttttgtttctcatgagtttaacagtcctttttagaaaccgcgggcacatgtcttgtagaaagatgtaatcactctccgcgtatgtcgctagggttgacatcacagtggtagtgttttccgaagaagtgacgttgtcagtgatattgtcagtgacgttaatttcttcccagtgtacggataactcgaacggtgtcgtatgcgccaccgctctcaacacgtaactacggccggtgaggttaagtgttagttgtcccacggtcacattggtgtcatttgtaaaacacgcgatttctccgcgaacttccgtgacgttggtttcacgggtctcgttgagaacacgcagaggaaaccagccttccagatgatactggaaaccaaacgtaagcatgacgctatgccattgtctccgtggttgccgaaacgttacgttcagaggcagtttggcttcggctcctgcgcaaggcccgttatagatttgcgtgtcattgcgcgtacagtttaaccggcagttcatactcgtggtgttagaagtgatgttaacacccgtgccgtggtacgtgcatcggaccgaaacaccgtgtcccgtgctccaaaacagcgtcaacaacagccacacagacacctacgtggagacgacacgggactttttattgacggagactcacgtttctaccctcccctttcccgtaggtaaaaacccacgtttatcacacacgttgtttttacctgaaacccgcgcagcccgtggacgcgacaaaaaaccgcggcactagaaagaaaatgaaacaagtatgtttattaagcagcatgtggggctaataggggggataactgaggtatagcaactatgaaaaaatactacaaaaaaaaaagctgaacatggtcatctagcagcaaagttctccttctagaccacgaccaccatctgtaccacgtcgccctccccggtcgtgtacatcacatccttcaccacgaccggtggcaacggcggcgacgaggacaactcgctctcgacggaggccgggacgacagaggacgggggggtggtggcggcggaggacggaggggtggcggcgacagcggggtcttcttccgacacgggcgacggcaggctcggcggcgcggacagcacccgttgcgccggggcgtgagaaggctgagccccggtggcctggatgtgggccaacgaattggctcgcagcgagtcgcgatccacgaaggtcataggaattttcccttcgcggatccgccgctcagattccaggatggcgcgcacgtagctgttcaccgacttggcaaaagtgcgcggcccttccgtattcttgtcgcgacgcgcttccagcacctgcttttcgtagtccagctggtggaagaccatcaccaggtcgtccatagtgtgcgcgtgctgacggacgtgggagcgcacctccaccgggaacaaagcgttccaatactccagcacgatggcaccgtgccagaactgcgccatgctgggcgccaggaaaaacaggataccggagtcgtaggcgaacacgtcccacttgggcgtcatgaacaacaccagctgacgcgtgggccgcaccgaagcttcctcccaggcctcgatgaccccgaacatgatgagctcctggtccaacggggggcagtgtcgctccagccaactgatcttgctcaggttcatctgcagaaactcgtaagaggggtcgcagatgcacacgtagagacccgagtcgtgccgcagcctggctccgcgcttcatcagtttcctcaccgcgtagcgaagcgccaccttgcccaacgccgacgcctggatcagtccccccacgtccatctgcgtctgtcgccactcggcctcgtccagcaggctcgtgatagcggaagtgctatgcgtggtcgtagtcatcctttctatccttctctatgaatagcagcaatagcggtaaagtcccttcttatactatcccggagtctgtggttttttttgtttacccctgcttactggtgagactgctgggggccgttgtgctgcagcagctgagctcgtcgccgccgttgccacaggaaccggtgcctccgcagggcctttttgagggcctcgcaggcttctcgcgcaagtcctgagaggccctcggcgtcgatggggttcacctcgggcgtccgagcctcgttttcttcttcttcatcctccctttcctcctccgtgtcctcccgctctgtgtcctccgttacgctctcctccccggcctcggccaagagcgcagccaccaagtccacggaccgctcggtctccgagttctcaccgtcaattacgccatgttggcggcgtaaccggtgccgagaacgccgggtgagcgcacatgcttttttctttcttaaccaaggcgggagaggatcttcaaggcgttttcgctggatccagcggtagctaaagtaccaaaaggccagcaggcccacgctacctaacagattcacgtagactggagacataattaaagaaagaagtgaaacccgcgtgtgggtctcacgtcgtcttgaaacaccgtcttatatacatgaagatgccggacatgacgcgcccaagacacgtggggtttcccccttaggggacccggtttcttaagatgtttttcatcttcgcacgcgatgtactacatcaaagggtcggctgaccgaccgcattgacgcacagtttccgagtacgcgcgtctcggagcacctgacggtgagccacccagctcacgcggataggggacaacactgacgtgaggggcgattcacgtcactgacggctgacgggaataagacgggtgagggatttccacctttttcttaagtgtgactctccttacggtaaatcgcacctgtgacctcttaacccctcctccctggtacccaataacagtgaaaaacacacaccacacgtcacgacaccgatcgattttctttattcttagtgtgatgataggtaagggcactcgtgaggatgtgcagttatcattatcaagccttcttcaaggcgtagtgatgatcgttgggcagaacccccaagctcctagcgatctgggaatagaaggaggagaacgaccccagggccagaatgcccacagtgtacatggcccaggtctccagaccgaacgtggcgggtcgcagcttcagatggtaggccacccgctccgagagttgtgaatgctcgttcaggcaacaggactgcaggtgggtgagcccaaaagcgctttcgtttacgccgcgcacgtgcaccgtctgggccgggcaatcctggtgttgcgcgcgaaaatggtcctgacaggagattccgtctacgtggcggcgcgtgttgttacccacttcgatcagcaacgtgttatcggcaggatgatgcgagaacgcgacgacggtgttgctggaggtctggcggcagcagtacacgtcgagcgtcatgagggccatgtcgccttggtggtacacggcgtacgcccaaccctggaacacgagcggacatcgcggaccgtgagcggacatcgcgccggcggttgttaccgtcgtctcggcaggagaacacaataaactcctgatcctcatacacaggagtccaagcgtcagaattaaagtccgcggagccataaccgcgcaagtgaagccgatacgagtgttgctgaatttgttcattctgccgactgttgctcacgagcgttcggaggcggtgccacaggctgttggccattaaaaagtcctggcccgaatgacgacgagacagagcccgaggcgaagaaaaaggcgcccgtcatgaagacgtaggcaggggaattcccatatttttatggcttcttttaaaagtctgtatccgactccatccggcgcttttcccaaaccgtggtctcctcgtcgtccgactcggtacccaggaggtggtaagtcttttgccgcacgtagaaagctttcaacgtggagcaaaaaatgagaataaagaccccgaaaacgaaacaaaccacgccgatcatgccgatgcagacgttcatgtcgacgtagccggcggtgctgttggcggtgcggcaaaagagtgtcatgtcgtgcgtgcacaaaaaacaacacacaccacaggccaggtcgtagcgtagttattattccgtagcagcaatgatggtacagtcaagcacatgctctatttcccgttaccccgatgatgatgatgatgttgtccccgttgcagtggaattgtcccggttaatcaccacggtgaacaccacggccaagaaaatgatccctaatatagcgaccactaagagagcaaaagtccatttccagccgttgtcaaagtacgcccccgtggtgggatgcatggtggcgggcatttccatcatatccatgtcgaacgtgtgtcgcggcgacggcgaactaaccaggcagtacgggggtcgatagggcggtgggctgcagtcgggtggtggcggcggtggcgtggaaaccgtcgtcgggcacagacccatggcctgctcgtaggtggggggcgcgtcgtcgtgatcccggtcgcggagcatcggcgtgggctccatgtcggtggcagtgacggcgacggtggtaactgtggtggagacggtaccgacggcgtccgcggctcaccttcgagcaaagagccccttctttttgcgcaaacgacggcaaaacagttctctgggacagccggtggcgcggtaagcgggtgccacgctttcagggtgggtaaaacagtcgcgggcgaagcagtagttgttgcagaaccgcaaaaacccgacgcgaaagaagcccaggagtccgcgcgccagaaagtgcgcctgccgcgtctcgggatgcacgccgaagacggcgccgctctcgttcaccagtatggagatgtccaggcgctgctgcgactccaccggcacggcccgcaccacaaatacctgcagcacgttcagcgagcacgtctcttttaaccagttgccgtgggccggatcctcgtaagtctggctcccgttcaagacgaccgtcgtcagcgcctcattaccgtctcgccagctgaagatggaaccctcgcgcttcatgcacaggcgccacagggccagcaggtcgcgcgccaacatgaactcgcgacccacgtcgccgccggtctcgaagcggacatagcccagttcttcgcgcagcggcgcgtagttgcgcaggccctcctgcacgaagccgcggaaaccggaccgcgacaccaggtacagcgattccaccacgggcgagtagacgtagacgcggccgccctcgccgatgagtacgggtagcggtgggcggccgatggcttcgcaacgactcacagtgcccaccggcagcaggaacttgtcgcagcacaggaaggtcttctccaaacctttaatattgagatgtccaaagtagccgacgcgtaacaggtcgcagtaggtgaaaaaccaaccgttcggccagctgagacgcagcaccgtgccgctgacgcgacgaaccagcttctgcaggtccttgcgggcgtcggcggtgacagagcagcggaaggtctcgttgaccagctcgacagccagcgcgtcctccagcgtacgttccttcatctcgtcgttgatgctctggcggcgccgccggatttcgtcgaaacgagccgcggaggcggcgaccgacgcggaggtcgtccgaacgccctctgtgacgctgtcgtccggccagtcaagaaagctaaggctggcgctgcgccgcctaaagtgtccgatccgcgcgggacgtcgctgagggacggtggctggtctgctggggcgggtacggccgcgggtgtccgcggacacgttagttatacacggaattgagtcacgtggcacgttgccagctgaaaccgccgtcgtctccgccggcgttttctccatcacgggaccgcgccgtgcgcgcgttcccaggcacgcggcccacgctctacccgcacttttgcttcttggtgttagggacgaactcgaacgttacagaatcctcgctgtcgctctcctctttcgcgtcgttaaagtaattgccggagttgcgatccaaaccgccgcctcctcctcctccgccgccgcccgatccacctttggacgtcaggtagctggtgatcttgtgctgctcgtatttttccttggaggaaagaccgtggtcgtgatcaccgccgccgccaccgctgctcattttccgcgtaccggaaccaccgccaccaccgcggtcgtgcttcttgccgccaccgccgccacctcctcccagaccgccgagacccatgggttcgttcatgagatcgttatccagacccgggccgtcgtcgtgcagaccgccggcattggccagcgaagagaggctgccgccaccaccgccgccgccacgcgacttgccgctgttcccgacgtaatttttatcgaagggatcgccacgctggaaaggttcctcggtgagaaaattctccacggcgaacagaccgttgcgactggccacgtacaacagcgtgtcgtgctccgtaactatacgcaacgtgcacggcagtttggtgacggcgcaattgagcagcgtctggtagaagttcttcagctgcacgttgatacgcatgttttttacgccgtggaaactgacgcggttattggccgtgaattccagctcgctgccgttggtcaggatgaatttgatggccggcggaccggcgtgcaccagaatctgcacggtgcccgtagggcagggcgcttttttaacgttacgcttgacgcgggtatgcggcccgatccacttaagcaggtcggccaccacgccgaaatctagatccacgtgcacggccgaattctcgctttcgcgcacaatgtcttggccgtgcacgcaggccgagctgaactccatattgaaatcgggcgcgcacatggagatcttggccgaaaggtccgagatgtcctgcacgtagaacttggtcaggtccttgctggaagtcaggtacatgaaattaccgagcagcggcgtggaattgttaatggtcttgggctgaaacgacttgtcagtgatgtagagacatgagctgttaaaagtgatttttgacacgcagtgactgcgtaccgtttgcaagataagcgacggcgtgggcaagaaggtaaccgtggtgttctccttgagcgcacggatcacagatcgcagctgctggatagccgtcttgtacggcttcagccgcagcgccagcgtcggcggctccgagaggcgcgtcttgcgatccatcccggacagcgtgcaagtctcgactaaggagcgggcgcgagcgagcgaaagttttatagagagcacacacgacgaccgggaacgctgcgaagacgcccggcgtctaataatacagccgcgccgagccagcgggcccccgactaagaggcacagtacttatatactccgaccttaaagcgccagtggtaccacttgagcatcctggccagaagcacgtcgggcgtcatccccgagtcatagtagaaaaccagggccacgcactggtccacaaacacgctcaggttcacggccgccatttccacgtcgttttggatcgccggcgccgcctggaacagacactgcgtcgccttaccctcctcctggtgctgctccaaccacgcgtaattcaccacgggcacgcgcagcggcctccgcaccacggtggggaagtaacactcacggttgggcgggcacaatgaccacaccgtctcctcctcgaacacggtgccgcgcgaagcccacactgacggcgtcacgccccacagatgcgccacctcgtcgtcgggacccaccgccagaaactgacagttgcgcaatccgaactcgagcatgtcggcgcgcagcgcttcccagcgcgcgctggcgatagagagccgcggcaaccgatacaattcgaaaatgaatttgccctcttgatagatggtgcgttcgaaccactcgcagcgcggcaaacccgacttgcacaaatcgacgctagcgcgcaccgcggcaaagtacatgtgctcaaagatgcgctcgatcaagtcccaagaggcaaagtacgtgaaccctaaccgcatgagcgccgtgtgcaagccggccacgccgatgtgcagcggacgcagtttttccagcgcgctctctacccaccattcggacgctgacattagcgcgtccaggcgcgcgttgccccaaaccaccgcctcggtcaccaactcgcgcagcacgctcaaatcaaagtaacgtcgcgtgttccccaaaaccacgtcgggtagatgcagcttctgctcgtcgctacgcgcaaacacgcagcgagccacgttcaccgtcagccgctgcaccggcatgtcacactcgccaaagtggcacgacgccatatcgggactcaagcacggcggcaggcacacgctgtcggccataatcgagtacttgactacgtgatggacaaagaccaccgaggcacggcccttgagcgcgcacagcaacatctttttcagaaaatcgtccgtgttcacgatcaccttggggcacgattgctcgcagcgcgaatactctttctcgaaagccgactcctgacccaggtccgagagccgccgggagacaggccgcccgaacagcgagtagcgctgctcacgcgcacggtatcgcttcattaacacgctaggcacgttgaaagcgtagcaaacccccgtcaactccgacgtgctttctttgagaataaagttaatcacgcggatagcggccacgtcccacatgtccacaaacacacgtaccacgggtcgatgcacctccttctcgcgtatcaaatcgcagtatccccccaggcaacgaatcacgctgttcacatcggcgttaagtcgcgttacgttcaccgacacagaaacgccgcaactcaaggtgctcatccatttgcacatagccgcccaactggcgtcacgcgaaaaagggtcggccgagatcagaaagtcgtactgcggcacgcgatcgaaacccacggtagacatggtgaaggtggacagcgacagctgcccatcgcgacagcgcttcaacaccgattccaacacctcgccttcgaaacgcgcatccagatggaaacgatagatgcgcgagtgcctactgttctcgatagccgccgtcaacgccacggcgatgcgcaaaaacacgccgcccggactctcgtcctgtccgtgcagttggcgacacaccttatccaaacacaaaatggccgcgtacaagccccagcaaccggccaattccacaaaacgcgccgtctcctcggccagcttgggtagatcctccatgtgacgcagcacaaaacggcgcaccgactcatcgcacagctccgaagcgtaacacagtggcgtgcggctttcacgcgcccagttggctttgaaataaaagcgacccaacagcagatcgcaacgcggcgagtgacgaattagacagggaccgtggcgcatgataagctgaaacagcctgaaactgcccaaaccggcactgtgccgcgacacggtgtccatctcgcgccacagcgcgttcctgtcggacggcagctcccgtgccggctcctgtacgccgcaaaagcgaaacttgccccaatagccgtgacaatgacactttttgcccatcaacatgcgcgtagcctgtatcggcggcgatactttgcagagcgaagccccgaaatcgtcctcctcctcgacactgtccagctccatcctggtcgcgccggtcggattgaaggtgctcaaaccgctactcacgcgtccaccgcgactgggcacggcggaaccgctgtcacgcgtcaacgacagcacagacggcgtgccgtcaggagacggcgactcgggacgccaactgacgacgccgccaccactcgtaaaacccgctacacacgctacgccgctcgacatgttagtattttcagcggatgcttccttgtcacccccgggcagcggcccttcctcgagctcgctgtcatctcccccggtagtatcagcgacggcctctgccgacgattcctccgtctcggtttccgcgccgcggctcggaatcctacctggccggcaccgatgtgcgggcaccgaggacacccgctgttcctcgtccgcgtcagccggagtcataagtttacgaggaaaagaacaaagaaatcaggtagatttcaataaagtgagtctagatggcgccgataactacggtttataaagtctgtgtgcgatgtgtttatttttttcttctgtgtctcctccccgtatgctgtcagcgccgctcagacgaattctcgaaagtctcccaattcgacgctaaagttgtccaaacggacgacggacagtttgagttctttgtgtaccaggaacgaggtgtgaatgtcgtcagccaggcaccagcccagcttttgtatgaccccggtacacagagggatctggcgtgggcgcgtgatgcgacggttgacaaagctacagcgctcgcgggcgaactttccgcgtgcaacgtcgaccagggtctgccagtgtgcgatgctggaggtgagcacgtagatgccgggacgtgtttcgggcccgtcatagtcatagacgatgattaaatacacgtattgcagccgtccccgggtctcttcccacgtcagatacatgtctttcggtatcatcaacgcgaacacctccgttttgagcgtgttgtaaaggtagccgcgcatgacgcaggtgagcaacgaggtgatgcccagcgagacggtcttgacgcagcccagcgtctcgaggcggcggtgcagcagatgcgggcccagatccagccactgcagcgcggcgcgcgcggccgaggccgtgtacacgctttcgagcaggcagcgcgtgctggccgagacgttggaggcgcgaatgcctaacaggtagaggctaatgtagaggtgtcgcggcgagtcgcaacccgtctccatgcggatgagcagcgcgcccggctgcgcctcgaactctaccaggccctcgggcacgaagaaacgcgccgtgagcgcctggtgatcggcgtggtagaggtagcgcaccgatatagtatttacctcgcgtttggctttgagcgccgtcactagttcattgtcctcgtcggccgggtcgcgcggccgtttggccaccgcgcgcgcgtccatgatggcgaggcgcacggtagatttcaaaaagttgatagagcagctgcgggcacgggccacggacaaagcggaggcgttaaataccgtgagccaattggagatcggcgcggtggatgcccaggacgtgaccgcgagcgccgtgcgcgccttcgtgggtgcgttgccgagctcgggctaccactttggcttcgtgcgtcagaacgtggtcttttacctcctaagccacgccacggtacagacggcgcgcgacccgctgtacgccgccgagcagttgcacgaacagctggaccgcttcctgcgacaccagcacgacggcggcggggacgaggaccggttgccgttctaccacaacggggccacactgacggctttccagaagctgttgcagaccctgcgcgagatccagaccgtaatagccgaacagagcggcggcaccgcggcagcggcggacttgatcgccagtaacaacgcgtcgaccgagcgccgcggcaagaagggcggttcgagttccgggggccagcagccgctggtccgccgggtgatcacgcagctggaaacggctgccacggaggcgcggccctacgtcaattgtcgcgccgtggccgaactcctggacctgacctaccagcggctcatctactgggcctgcacgctcatgccctacgtgttgtttcggcgcgacaccgacaccgaactggacacggtgcttctgatgcattttttttacacacactaccgttcggttaacggcgatttggccgtggagtttcaaaactacgtcaagaacagcgtgcggcacatgagctctttcgtcagttccgatatcgacggcgaccagaagcccggtgccgaacacatgcgtgacgtcagctacaagctgttcgtgggtaatctgcaggcgcgtgacgccagcggcctcatgtttcccatcattagcacgcgcatctccaccgtgaacctttacctgtcgcccgaacgtatgtttttccacccgggtctgatctcgcgtctgttgagtgaggaagtttcgccacgcgccaacctagacgcttacgcgcgcgtgtgcgatcgcgtgctggaagaccacttgcatacgccgcgacgcgtgcagcggctactggatctgacgcagatggtaacgcgactggtggaactgggtttcaatcacgatacctgcgcggcctacgcacaaatggcgctgatccagccggccagtcagaagagctcgctctttgtcagcgagattcgcgagaaactcatacagatcatctacaatttttacacgtttttcatgtgcctctatgtgtacagccccacgttcctgttcgaccaccggcggcggttgattttggagcagcatcgatccacgttgatcggctccaaggaggaactacagcacgtctggagcaacgtgatactgaacgtcaatacgcactttgcggttcagtacacggaagaagactttgaggcacatacgaagggtgccacggaggcggagcgcgagtacctgtatcgggacctgcacagcaagtggggcgtgcacctgtttaccttgcgtccgtctcgcggcgcggccggcgcggcctcgcctttgcctccgcttgacggcgtcacacgctccgacatcttacgcgaatgcgcgctcgttaatctgaacgaaggccgcgtcaactacgcctccctgctagccttcagtcatcatcccgagttccccagcatcttcgcgcagttggtggtggtaactgaattttcggagatctttggtatcccgcagggcctgtttcaagccgtgggttcgccgcgtctttttgcgctcattcagctgtgtcgtgtattgttgcccgagcaggtgacgctgtaccagaacctggtctccatctacaacctgaccacctttgtcaagcacatcgacgccgcggtttttaagacggtacgcgattgcgtcttcgacatcgccacgaccctcgagcacctcagcggtgtacccgtcacgcccaatgtggacctgctggccgagctcatggcgcgctccgtagcgcataacctgtacaccaccgtcaacccgctgatcgaggacgtgatgcgcagcagcgccggcagtctgagaaactatctgcgacacacgcgactctgtttcggtctggcgcgtgggcgggcgcgcctctcggaggacggcgtgacggtgtacgtggaggtacagggtcagtacggactgcgcgtacctaccacgcgtttcgtagaacagttgcgcgagctggttcgccgcgatcggctgttggccgagaatctgcgcggcttgaatgagcgcctgctgagtgttcgcgtgcgcgtacgtcagatcagcagcgacacagaggaagtaagccgacacgccaagggtcaccgcacggtggcccagatgagcaaggcgctcaaaaagacggcctccaaaatcaaagtgttggaaacacgcgtgacattggcgctcgagcaggcgcaacgttccaatggcgccgtcgttaccgcggtgcaacgcgcgctagccgtctttgacgtactaagtcgcgagaacttggaacgccgcggcgcacagctctgtctgacggaagcgacgagcctactgcaccgacatcgcgcgctagcgccgatgacctggcccgcgggcacgggcgttgcggcggcggccgaagcggatcgcgccttacgcgagttcttggaggcgccctgggaatcggcgccccaaccgccgcgactccgcatgacgcccgacaccgatcacgaagaatcgacggcaggcgcgacgtccgtaccggaggtcctgggtgcgcgctacgaacccgcacacctggccgcgagcgacctattaaactggtacatcgtccccgtaagccaggcgcagcaggacatcttgtcttcgatcgacccgcccgccggctcgacatcggtgtccctgccgccggcctcgccatgaaagtcacgcaggccagctgccaccagggcgacatcgctcgctttggagcgcgagcgggcaatcaatgcgtctgcaacggcatcatgttcctacacgccttgcacctgggtggaacgagcgccgtcctgcagaccgaggcgctggacgccattatggaagagggcgcgcgtctggacgcgcggctagagcgcgagttgcaaaagaagctgcccgccggcgggcggctgccggtctaccgactgggcgacgaagtgccgcgccgcctggagtcgcggttcggccggaccgtgcacgcgctctcgcggcccttcaacggcaccaccgagacgtgcgacctggacggctacatgtgtccgggcatcttcgactttctgcggtacgcgcacgccaaaccgcggcccacctacgtactcgtcaccgtcaactcgttggcgcgcgccgtggtcttcaccgaggaccacatgttggtctttgatccgcacagctccgcggaatgtcacaacgccgccgtgtatcactgcgagggtctccatcaggtgctgatggtgctcacgggcttcggcgtgcagctgtcgcccgctttctactatgaggccctttttctctacatgctggatgtggcgaccgtgccagaggctgagatcgccgcgcgtttggtctccacctatcgcgaccgcgatatcgacctcaccggcgtcgtccgggaaagcgcggacacggcggcgacaacgaccaccgccgcaccttccttacctccgctgcccgaccccatcgtcgacccgggctgccctcctggcgtggcgcccagcattcccgtctacgatccctcgtcctcacccaaaaaaacacccgagaaacgccgcaaggacctcagcggtagcaaacacggaggcaaaaagaaacccccgtccacgacgtccaaaacactggccaccgcctcctcctcctcctcagcgatagcggcggcctcttcttcgtccgcggtaccaccgtcctacagctgcggcgaaggggccctgccggccctgggccgctaccaacagctggtcgacgaggtagagcaggagttgaaggctctgacgctgccgccgttgcctgccaacaccagcgcctggacgttgcacgcggcgggtaccgaaagcggcgctaacgcggcaacggccacggcgccgtccttcgacgaagctttcctcaccgatcgtctccagcagctcatcatccatgccgtcaatcaacgctcgtgtctgcgtcgcccctgcggcccgcaatcggcggcgcagcaggcggtacgcgcctatctgggcctatccaagaaactggatgcctttctgctcaattggctgcaccacggcctggatctgcggcgcatgcacgactacctgagccacaagaccaccaaaggcacgtactcgacgctggatcgcgcactgctggagaagatgcaagtcgtcttcgatccctacggacgtcagcacggcccggcgctcatcgcctgggtggaggagatgctgcgctacgtggaaagcaagcccactaacgaactgtctcaacgactgcaacgtttcgtaaccaagcgaccgatgcccgttagcgacagcttcgtctgcctgcgacccgtagactttcagcgtctgacgcagatcatcgaacagcgacgtcgggtgttgcaacgtcaacgcgaggaataccacggcgtttacgagcacttggccggcctcatcaccagcatcgacattcacgacctagacgccagcgatctgaaccgacgcgaaattctgaaagcgctgcagccgttggacgacaacgccaagcaggaactctttcgcctgggcaacgccaaaatgctagagttgcagatggacctggaccgtctgagcacgcagctgctgacgcgcgtgcacaatcacatcctcaacggctttttgccggtagaggacctgaagcagatggaacgcgtcgtcgagcaggtactgagactcttttacgacctgcgcgacctgaaactgtgtgacggcagctacgaagagggattcgtcgtcatacgagaacaactgagctacctcatgacgggcactgtgcgcgacaacgtaccgctactgcaagagatcctgcagctgcgacacgcgtaccagcaagccacgcagcaaaacgagggtcgcctcacgcagatccacgacctgcttcatgtcatcgagacgctggtgcgcgacccgggcagccgcggctcggcgctgacactggccttggtacaggagcagctagctcaactggaagcgctaggcggcctgcagctacccgaagtgcagcagcgcctacagaacgcgcaactcgcgctaagccgcctctacgaagaggaagaggaaacgcagcgtttcctcgacggactctcgtacgacgatccgcccaccgaacagaccatcaagcgacacccacaattacgcgagatgttacgtcgcgacgaacagacgcgtctgcgactcatcaacgccgtactgagcatgttccacacattagtgatgcgactggcgcgcgacgagtcgccgcgaccgacgttttttgacgccgtcagtctgttgttgcagcaactgccacccgactcgcatgaacgtgaggatctgcgtgccgccaacgccacgtacgcgcagatggtcaagaaactggagcagatcgagaaagccggtaccggcgcatccgaaaaacgcttccaagcgttacgggaattggtttactttttccgtaaccatgaatatttctttcaacatatggtcggacgactgggcgtcggacctcaggtaacggaactctacgagcgatatcaacacgagatggaagaacagcacctggaacggctagaacgtgaatggcaagaagaggccggcaagctcacggtaacttctgtggaggacgtgcagcgtgtcttggcccgggcaccgagccatcgtgtcatgcatcaaatgcaacaaacgttaaccaccaagatgcaagactttttagacaaggagaaacgtaaacaggaagaacagcaacggcagctactggacggctaccaaaaaaaggtgcagcaggatttgcaacgcgtggtggacgccattaagggcgagatgctctccaccatcccgcaccaaccactggaggccacactcgagctgctcttgggcctagatcaacgcgcccaaccgttactggacaagttcaaccaggacttgctgtcggcgctacagcagctgagcaaaaaactagacgggcgaatcaacgagtgtctgcacggcgtgctgacgggtgatgtagagcgacgctgtcacccgcaccgagaagcggctatgcaaacccaagcctcgctaaaccacttggaccaaattttgggtccacaactcctgatccatgagacgcagcaggccctgcaacacgccgtccatcaagcgcagttcatcgagaagtgtcaacagggcgatccaactacagccatcacgggcagcgagttcgagggcgactttgcacgctaccgcagcagtcaacagaagatggagggacaattacaagagactagacaacagatgaccgaaactagcgagcggctggatcgctcgctgcgccaggatcccgggaacagctccgtcacgcgtgtacccgaaaaacccttcaagggtcaggagctggcgggtcgaatcacgccgccacccgccgacttccagcggcccgtcttcaaaacgctgctagatcagcaggccgacgcggcccggaaagcgctcagcgacgaggccgatctgctgaatcagaaagtacagacgcagttgcgacaacgcgacgagcagctgagcacggcgcagaacctgtggactgatctggtcacgcgccacaaaatgagcggcggactggacgtgaccacccccgacgccaaggcgctgatggaaaagccgctggagacacttcgcgagctgttgggcaaagccacgcaacaactgccgtacctgtcggcggagcgcacggtgcgctggatgctggcctttctggaggaagcccttgcgcaaatcaccgcggaccctacgcacccgcatcacggaagcaggacccactaccggaacctacaacagcaagccgtcgagagcgccgtgacgctagcgcatcaaatcgaacaaaacgcggcctgtgaaaattttattgcacagcatcaagagacgactgccaacggcgcgtccacgccgcgggtcgacatggtccaggcggtggaagcggtctggcagcgactggaacccggacgcgtagccggcggcgccgcgcgtcatcaaaaagtgcaggaactgttgcagcgcttgggtcagacgctaggcgacctagaactgcaggaaacgttggcgacggaatactttgcgctgttacacggaatccagaccttcagctacgggctggactttcggtcgcagttggaaaagatccgcgatctgcggacccgttttgcggaactggccaagcgacgcggtacgcgtctctccaacgagggagccctgcccaacccccggaaaccgcaggcgacgacttcgctgggcgcctttacacgcgggttgaacgcgctggaacgacacgtccagctgggtcaccagtatctgctcaacaagctcaacggctcatcgctagtctataggctggaagacattcctagcgtgcttccgccaacgcacgagaccgatcccgcgctgataatgcgcgaccgcctgcgtcgcctatgcttcgcgcgtcaccacgacaccttccttgaagtggtagacgtcttcggcatgcgacaaatcgtcacgcaagccggcgaacccattcacctggtcaccgattacggcaacgtagcctttaagtacttggcgctgcgagacgatggccggcccctggcatggcggcgccgctgtagcggcggaggactcaagaacgtcgtcaccacacgttataaagccatcacggtagccgtggccgtctgtcagacattgcgcactttctggccgcagatctcgcagtacgacctacgaccctacctcacgcagcatcagagccacacgcaccccacggagactcacacgttacataaccttaagctcttttgttatctggtgagcaccgcctggcaccagcgcatcgacacgcagcaggagctgacggccgccgatcgcgtaggaagcggcgagggtggtgacgtaggggaacaaagaccgggccgcggtaccgtgctgcgcctgagtctgcaagagttttgtgtactcatagcagctctgtaccccgagtacatctacaccgtcctcaagtacccggtgcaaatgtcactaccctccctcacagctcacctacatcaggatgtgatacacgcggtagtcaataacacacacaaaatgccccccgaccacctccccgaacaggtcaaggccttctgtatcacccccacccaatggcccgccatgcagctcaataaactgttttgggaaaataaactggtacagcaactgtgccaggtaggcccgcaaaaaagcacaccacccctaggcaagctatggctctacgccatggccacgctggtctttccacaagacatgctgcaatgtctgtggctagaactgaaaccccagtacgccgagacctacgcctcggtgtccgaattggtacagacgttgtttcagattttcacgcaacaatgcgagatggtgaccgaggggtacacgcaaccgcagctccccaccggagagccggtgcttcagatgatccgcgtgcgacaccaggacacaaccaccacagacacaaacacgaccacagagccaggacttttagatgtttttattcaaacagaaaccgccctagactacgcgttgggctcctggcttttcggcatacccgtgtgtctcggcgtgcacgtagccgacctgctgaaaggccaacgtgtactagtagcgcgccacctcgaatacacgtcgcgagaccgcgacttcctccgcatccaacgctcccgggacctcaatctcagtcaactgctccaggacacgtggaccgaaacgccgctggagcactgctggctacaagcccaaatcagacggctacgcgattacctgcgtttccccacccgcttagagtttattcccctagtcatttacaacgcacaggaccacaccgtcgtacgcgtgctgcgaccgccctccacgttcgaacaggaccacagtcggctggtgttggacgaggccttccccaccttcccgctgtatgaccaagatgataactcatccgcggacaacgtcgctgcgtctggcgccgctccaacaccgccggtacctttcaaccgcgtgccagtcaatattcagtttctgcgtgaaaacccgccacccatcgcgcgagttcagcagccgccgcgccgacatcgtcatcgagcggccgcggccgcagacgacgacggacagatagatcacgtacaagacgatacatcaaggacagccgactctgcattagtctctaccgcctttggcgggtccgtctttcaagaaaaccgactgggagaaacaccactatgccgagatgaacttgtggccgtggcgcccggcgccgccagcaccagtttcgcctcgccgcctatcacggtgctcacgcagaacgtcctcagtgctctagaaatactgcggctagtgcgattggacctgcgacaactggcgcaatctgtgcaggacactattcaacacatgcggtttctctatcttttgtaaccgacactgacagtagcgggtaataaaaacaagaggattgttatcgtttttttatgataaaaaaacaacgtgtcattttcacggtgatttattcttgctattatttttccccatgggctgtcagcgtcgggtgcgcgacactgctaccatgcgcaacaggtccagtttaaaggcgcacttgtcgttaaacaggctggacatgcgtgtatatttgctcagcatggtggccagcaccgggtgggtggcctctgagatctcggtcggcaactccaaaacgacgttgacgacgtgacggtgtttttcgtcccgcttgttggccaccgtgggtcccggcgcggtgttagacatggggcaggccgtggggggaggacgaggaggaagtcgctgctaaaccgccacgcgcctgctgcacaatgtggccgccgacgtggcaggcggtctgtttaaccagcgcgcagccccgacacagcggggcgccgtcttcgctttccaaacagctgtcgcggtactcgcccgtctgacagcgcgcgcacagcaggccgtgcccgtgcgaagtgaggcgcaggagacgcgggaccgtcacgccgcgtaccaccacagtggagtcgcaggtgcgtgccgcgcagggcagaatgacgtcgaaagccagccggtgatcgtacacggcgcaagccgcgttgaggcccagcacggctttccagcccacgcgtacgcagcgctgtccaaagagcgtctcggagacgagctcgtagacgcgctgccgcaccacccgctgactgccgcagagcgagcagtgtacgagctcggcgtgcgtgttgaagatgacgctcttttcttgacggtcccgataatagaacatcgagttgagcggaaaattttgctggcagtgtagcttttccttacccaggttgaggcagtgtccgcactgccgacagaccacggccaccagcgagcgcgcgtccagatggcgctcgcacttgagtcgacacagacaccagagcggcaggtcgatgacgctgccgatgaggccgccgcgcagcgcggcgctgagtgcaaagaggacgatcttggtgggctctacgtgacgcgcctgctgtccggcgcccgcgtgtcctaccgccgcagctgccgccgtcgagcctcctccgcgcgtctcgtcgtgcagacccagtgcccgcaacggcaccaggtatcgcggacacgtgtcgcaaaacgtctgcaccgcttgtcgggccagtacgtagagcgggtttccgcagggtaccttcccagcgtgccggcgcaaggctgcgatgaggccccgcagctgcggcgaccgcggctgccgttggtgacaccactggttacggtggtatacggccaaatcagcgcgggcgtcgaagcgcttggcgcgtagtagtgctaggcacggcgagctggtggggtgaagcacgggcagccgaaggtccaccccgaaaaggaaacggtgaaggtcacctagcagcgaggcggtgacaccgtccaacaacgcgtgcagccgctcgggcgggtagagccgcagacggcgcagcaggtagtcggtgtcgtagcgttcgaaacgcagaaaggccatcgtgcggacggccacggtgtgcagacagtccatgctgtagacgtaagcgagaaacacaaagtagggcttggtcataaccatacgctgaaagagcgccgtcaccgcctcccgctcggcctgccgacacaccagccattcgcgcaggaagcgttggtagagacggtcgcccagctcccgattcagaaagcgcttatccgtcacgaagagatgaaggacgcaagaacgtggcacgtgatgcaccagctgctgctggaggaccgccgacgtctgcgccgcaaactgcgccggtggctgcgacgtttctaccgccgcttcctccggctgcagcgcaccgcggccgatcaccagctgcacatggaaatggtcctcgtgaacgcagaggggcgcgaagagacggcgcagagcctggtggaactcatcagtcgcggtgtgcggagcgtgtcggagacgacgactggccatgaccgcgccacagcagagccagcaccagcagaagagccagcaccagcgggcccagagtcgcaaagcgcgcgggcagccacggcccagactgcggtcgcgatggcccggagcgcgctcgccaccacgatgacggtgcccaacgataaccagtccgctccaaggacggcgcgcacggcggagacggcggatgacggtgatgggtcgacacccctcgccgacgactcacgtgctcctccagaggccgacgcgcggaccctccgacgtcctggcccgccgctgccgccgccgccttcccttctcccgccagagccagcaactcctcctcctcttcatcagcgtctccctcgcttgcgcatccgcatcgtcccatacaggcctcacaacgacacagccgccacgaccccgccgccatgggtggcggcggcggccgaggcccggcagcggcgccgccagcggcgaccatggtgggagagcaactcggatgacgaggaggaggaggaggagggggagatgcggtccgagaggaccgctttcccgccgttcgcgtgagcgcggccgacatgcgggcgcgccacagggacggaccgctgccgctgtgactgcttacggtgacgtggttccggaccgccaacgacgtcgacgcggctttcttggcgtacagctcgcgcagcagattctcgtactcgccctcgttttcgggtccgaaggcgatgagctcgatgttgaagaccgacgccgaattggatttgcgcaccacgcacttcgtcagcactccgtaggccgagggcttgatctcctcgatgtccttgagcgtgacgatgagcgactcgttcaccttaagcacattgaactcacctacgtggcgcgccggcgagacgagcttgacgggcgctcgcacaaaacagcagagggagacggcgcagccagtgtttttaaagataaaacaaggcacgtggtctgtgcggctctcccagtagctgagcagatactcgacacaatagaccgtgtctgtcttgagcatggcgtcgcacaccgagtaattgggatttttacagataaggccggcgtcggtgacgcgcagctcgctgggacccaacttgaggatacgccgcgtggcctgcaccagatcctgatggagaaccttgttcatctccatcgcaccgacgccaccgccgatttatttacccggcgccggctcgtcttttccctccaggattccgttaatgtccatgagcttgctgacgatcgccgttaatagttgcgtcttctcacggaggatctctccgtgactgcaggtcgcgcagtcgccgtgcacgtacttgaggaaggcggcgtacttctgacccgcgttcacgaaatttaagcgcgcgtccagggagggcagcaacagatcgtagacgcgcggcagcatcggctcgaactgtaatagcagatcgtcgtcaagatcgggtagcgcgtgcccgtcttcaccgtcctcgtcgtcaccacctcccccctcgagcccaccgctcgtaccagccgcgggctccgcgtcctcgtcgatcaccagcggtcgcgtcggcaccggagaatccacgtcatcctgcacgtcgttttcctcctctccgtcgtcatcgtccagaaacggcacccgctgcttagcccaggacattctttctccgcgtcctcaatcagcggcgccgatcgccatgaatccgagtacccacgtgagcagtaacggcccaacgactcccccccacggggcccacaccacgcttcttcccccgaccagcccggccccgtccaccagctccgtcgccgccgctaccttgtgcagtccgcaacgacaggccgtttcgcgttacagcggctggagcaccgagtacacccagtggcactcggacttgacaactgagctgctatggcacgcgcacccgcgtcaagtacctatggacgaagcgctggccgccgcggcggccgcctcataccaggtgaatcctcaacaccccgccaaccgttaccgtcattacgaattccagacgctcagcctcggcacctcgggggtagacgaactgctcaactgctgtgcggaagaaaccacgtgcggcggcacgcaatccaccgtactcaccaatgcgaccaacaccaccaactgcggcggagccgtcgccagcagtagcaacgcaggacctgccggcgcttcggccgcctgcgacctagatgcggaactggccggcctcgaaacctcggcggccgactttgaacagctgcggcgactgtgcgcgccgctggccatcgacacgcgctgtaacctatgcgccatcatcagcatctgcctcaaacaggactgcgaccaaagctggctcctcgagtacagcttactgtgcttcaagtgcagctacgcaccccgtgcggcgctcagcacgctcatcatcatgtccgagtttacgcatctgctgcagcagcacttttccgacctgcgcatcgacgacctgttccgacaccacgttctcacggtcttcgatttccacctgcactttttcataaatcgttgctttgaaaaacaagtgggcgacgcggttgataacgagaatgtcaccctgaaccatctggccgtggtgcgggccatggtcatgggcgaagacacggtgccttacaacaagcctcggcgccacccgcaacagaagcaaaaaaacaacccttatcacgtcgaagtgccgcaagaactgatcgacaactttctagaacacagctcacccagccgcgaccgcttcgtgcagcttcttttctatatgtgggccggcaccggcgtcatgagcaccacgccactcacggaactcacgcacactaagttcgcgaggctagacgcgttatccacggcctcggaaagagaagacgcaaggatgacgatggaagaagaggaggatgaagaaggggaagaaaaaggaggagacgatccgggccgtcacaacggcagtggcaccagcggggggttcagcgagagcacgctaaagaagaacgtgggtcccatttacctatgtcccgtacccgccttttttaccaaaaaccaaaccagtaccgtgtgtctgctgtgcgaactcatggcctgctcctattacgataacgtcgtcctgcgcgagctgtaccgccgcgtcgtctcgtactgtcagaacaatgtgaagatggtggaccgcattcaactggtattggccgatctgttgcgcgaatgcacgtcgccgctcggcgcggcgcacgaggacgtggcgcgctgtggactcgaagcacccacctcgcccggaggcgactcggactatcacggcctgagcggcgtcgacggcgcactggcgcgacccgacccggtattttgccacgtcctgcgtcaggcgggcgttacgggcatctacaagcactttttctgcgacccgcagtgcgccggcaacatccgcgtcaccaacgaggccgtgctcttcggacgcctgcacccccaccacgtccaggaggtgaaactggccatctgccacgacaattactatataagtcgacttccgcgacgtgtgtggctctgcatcacactcttcaaggcctttcagattacaaaacgcacctacaaaggcaaagtgcacctggcggactttatgcgcgatttcacgcagctgttggagagttgcgacatcaagctggtggaccccacgtacgtgatagacaagtatgtctagcgtgagcggcgtgcgcacgccgcgcgaacgacgctcggccttgcgctccctgctccgcaagcgccgccaacgcgagctggccagcaaagtggcgtcaacggtgaacggcgctacgtcggccaacaaccacggcgaatcgccgtcaccggccgacgcgcgcccgcgcctcacgctgcacgacctgcacgacatcttccgcgagcaccccgaactggagctcaagtatctcaacatgatgaagatggccattacgggcaaagagtccatctgcttacccttcaatttccactcgcatcggcagcacacctgcctcgacatctcgccgtacggcaacgagcaggtctcgcgcatcgcctgcacctcgtgcgaggacaaccgcatcctgcccaccgcctccgacgccatggtggccttcatcaatcagacgtccaacatcatgaaaaatagaaacttttattacgggttctgtaagagcagcgagctactcaagctctccaccaaccagccgcccatcttccaaatttattacctgctgcacgccgctaaccacgacatcgtgccctttatgcacgccgaggacggccggttgcacatgcacgtcatcttcgaaaactccgacgtgcacatcccctgcgactgcatcacgcagatgctcacggcggcgcgcgaagactacagcgtcacgctcaacatcgtgcgcgaccacgtcgttatcagcgtgctgtgtcacgccgtctcggccagcagcgtcaagatcgacgtgactattttgcaacgcaagattgacgagatggacattcccaacgacgtgagcgagtcctttgagcgctacaaagagctcattcaggagctgtgtcagtccagcggcaacaacctatacgaggaggccacgtcatcctacgcgatacggtctcccctaaccgcgtcgccgttgcacgtagtttccaccaacggctgcggcccctcctcctcctcgtcccagtccacgccgcctcatctccacccgccgtcgcaggcgacgcagccccaccactactctcaccaccagtctcagtctcagcagcatcatcaccgtccccagtcaccaccgccgccgctgtttctcaacagcattcgtgcgccttgacactgtacggcagaaaagccggctccaagtgcaagcgccgcggcagcaccatgtgcaaaaacttgtccttgcgcgcggtttcgccgccgggaaagacgggcgacagcacgttggttacagccttgagaacctgctcaaagtacttgtcggtgtgaatgggcacgccgtgctcgcgcacgtagctcggatcttcggctacctcgtagttgcacacggccgacggtggtttccgcgccctcttctttgccggctctcctcctctcctgttgctctcctctaccccgccgccgtcagcgtcgtcgtccgtgccatcaatcgcgtccgaccgggaaaccacgccggcggttacagaatcaccgttgtcggaggaaccctgcggcgccgtccggacaccgggcgccgtcaggacgtaaaagacccgatccccgaccgagggtagctcctcagaacgggccgccagtcgcttaatgacggcaatgtgcggcaggttagattgacggtacaacgagatgtccttagaaagcaccgacgaaagcaccaggtcctcgacacgcacacggtgcaggtacagatcgtcgcgggcctgcaccaggcggcgcaagatacgccagaaaccgcgtggcacgccgtatttcttgacttcatcgagtgagaggcgcgacaggcgcacggctgcttccgagacctcgcgatcctcaaagagcagcgagaggacgtcacgcgtgacgcccttgacgaactcgcaggccgtcttgcgcaccagatccacgcccttcatgctcagacccgaggcgccctccactttgccgatgtaacgtttcttgcagatcatcataagagagacgaagaccttttcaaactccagcttgacgggctccacaaaaagacaggccgtcacgtagtgcgccaggctgggcccacgcgccaccagagcctgcggcgtcaggccacgaaagcggacaaacacgctgtccgtgtccccgtagatgacccgcgcctccacccgccgttcgtccgagccccctgacgatgtttcgagcccctccggtaacgtgctgctctcctccgaatccccctctcgcgttctcactacatagtcttcctgattaaaaaaattgtgcaaaaaacacggctctgaaaaattgtctttgatgaaccgcgccgtgcgctctagcatgtcgcgaccgatgcgcgtgatgctggcggcgatgggcagacacggcatcatgccgttgaccacgccggtaaaaccgtagaaagcgttacacgttactttgagtgccatctgttccttatcgagcagcatacggcgcacggggtcttgacactcgcgcatgcattcgcgcacggcacggcgctgcgaaacccacttgttgagcagttccgaaagcaccgagacgcgcaccgaagcacgcacaaagcggtgagtcacgccgttctctagcgtgacgctgtatacgtcggcggggtccacggggtactcgccacccggcaccagcagggtggagtagcagaggttgtgagccatgatgatggaagggtagaggctggcaaagtcgaacacggccacggggtcgttgtaataacccacctcgggctcaaacaccgtggcaccctggtacgaaaccgccgcagtaccgccggcgccgtgactgtcgttggaaacgccgacgctgccactactgccggagccgacgctgaaaacgccgacgctgctactactgttactgccagagccgggtaaaacgccgtcctgactcgacggcgcagattgcaagggcggcgacatctgaaacatggccgccacagaacccgcgtcgccgggcacggcagcggtagagatgatagcggcgttaggtgacacggcaacgctattcgtttcgggcaccgtcgtacctttgctgtagtggttgggcaggataaaatcgcggcaggcgcactcgtccagcagcgaggtgtagatacggatctgctgtccgtcaaagatgacacgccgcaacggaattttagccagccgcgcgatggccccggcctcgtagtgaaaattaatggtgttgaacagatcgcgcaccaatacggcgtcctgcagacagtaacggcctacctgggcgcggccctcggcattagccacgaaacaacgcgggatgtccttgtaggacaggtcatccttgcgttgccgcaggtaaagctcggccatagtgttgagcttatagttgggcgagttagtcttggccatgcatacggggtacatgtcgataaccaccgaacccgcaatatacaccttggtggcggccgtgctggccggattgttgtgagaagccgagggaaaggcggcggcgtactgccgcttaaaacccacggcggggctgtgtaaaaagaaacggccgccctgcgccgtgggcaacttgcagaagcgctgcgagtccaccttatacaggtactcgaggcgcgtgaggatgtacttcaagtcaaaagagttgatgttgtaaccggtcacaaaggccggcgcgtaccgttgaaagaaaagcataaagcccagcagcagctcgtattcggaagggaactcgtagacgtccacgtctgggcccacctgcccgcaggtgccgatcgtaaagagatgaagacccgagtgcccaaagatcacaccctccgaagtgcagccccgaccatcgttcccgtttgggatcccctgatccacggcggtgtttccccccgtctcgtagcacacgcacgagatctgaatgacaatgtcatcggacttctcggcgcagggaaaaccaccctcgccgctcatgcactcgatatcgaaggacaggcatcgatagcgcggccacgagctgtcgtcgggcacggccaccaggtcagagacatcgcagtcgacctcgatatcacaagtcgacgcgcgaccctgctgccgccagtcgtaacgattcacggagcaccagccgaacgtggtgatccgccgatcgatgaccaaacgcgtcagcggatccacacggacctcgtacacgggaaaaccctgctccagcagatactcgccgatttttctggccatggtccagttgctgatagacacacactgcaaatcgggcacgggtcgcgtcccgtacccgtagatggaggtcttggtggccggcgtgacagacacggcgtatggcgtccgcggctcgggcactagttcgcccacgctggcaatgacctcacgcagcctatcggtgtcgctgtactcacagtaaaagtagctgcgctgcccgaaaacgttgacgcagatactgtagccgtgttctgtggccccgaagaaacgcaacacgttccccgaaggcaccagatgctgacgatagcgcggcgacacgttttcgggcgagtcgaagaagagcacggcgtccgtctgatcgtaggtgtgaaaacgaataggtcccaccacgcgacccaccagggtctcgcgccaaggacacggccaaaccatgtcatgactcaacaaatgtttaatctctcgatagaacatgagaggcagccgtcccgtcttatgcttgatcaaccccgtctgaccgtcgaacatgacgcctcgcggcacgatctgcaaaaactgtttctgtggcggccgcttgcccgagccctgcgcggagccgggctgcgaacgctgacgccggccacccgcgaccgcaccgccggtcacgccgccgctcagatacgggttgaaaaacatagcggaccgtgagaggctgacagcttacgaagcacaatcacaaagaaaatacacatgcagcacctagatatccagtttgaccccgtatatcacaagtctctgtgtcactttttttgtctgttttttttttcttctcctggttcagacgttctcttcttcgtcagagtctttcaagtgtcggtagccgtttttgcgatgtcgcagtcggtctagcaggttgggcttctgtcccttgtcctgcgtgccagtctgtccgtccaaagaatctgtaccgttctgctgcgctcgctgctctgcgtccagacggaccagggccagaagcatctggtaagcctgctcgttggtgtaaggcggagccgccgtggatgcatcagacgacggtggtcccgatcctttgcgaccagaattataaacactttcctcgtaggaaggcggagcctgtaacgacgtgtctttggtgttgcccgacgtcacggtggtcccgttggcggacaccagatagggaaagaggttctgcagcggctgcatgcagagacgccgctgtcgagtatagatcaaataagtgataatgactacggctatggccacgaggatgatggtgaaggctccgaaggggtttttgaggaaggtggcaacgccttcgaccacggaggccaccgcgccacccacggccccaatggctacgccaacggcctttcccgcggcgcccaggccgctcatgaggtcgtccagacccttgaggtagggcggtagcgggtcgactaccttgtcctccacgtactttacccgctgcttgtacgagttgaattcgcgcatgatctcttcgaggtcaaaaacgttgctggaacgcagctctttctgcgagtaaagttccagtaccctgaagtcggtattttccagcgggtcgatatccagggcgatcatgctgtcgacggtggagatactgctgaggtcaatcatgcgtttgaagaggtagtccacgtactcgtaggccgagttcccggcgatgaagatcttgagactgggaagctgacattcctcagtgcggtggttgcccaacaggatttcgttgtcctcgcccagttgaccgtactgcacgtacgagctgttggcgaaattaaagatgaccacgggtcgtgagtagcagcgtcctggcgaatccttcacgttcatatcacgcagcaccttgacgctggtttggttgatggtcacgcagctggccaggcccaagacatcacccatgaaacgcgcggcaatcggtttgttgtagatggccgagagaatggctgacgggttgatcttgctgagttccttgaagacctctaggctgcgccgttgatccacacaccaggcttctgcgatttgcgccagcgcccggttgatgtaaccgcgcaatgtgtcataggtgaactgcagctgggcgtagaccagattgtgcaccgattccatgctggataaatgagttgcattgttgccatctgcacttcttttggttctactatgagtaagattcagactggagcggttggccaaacgttcgagttccaccagagatttttgcttgataccttgccagaacaccaccaaaccaccagtggtttcaaacacggacacgtttccatatttttcatatgtttgattgtatgaagtattgaaaatctgctgtaacttatttatggcctcatcacgtacgcagtccagcgcagagtcggacatgttcacctcttgcttcttagataagaaagtggcggtcattttggcagaagaaaagtgatacgagtcctcggcttcggaacgaatggtgcgttccgaggcttcccagaaagtgagttgacaagtaacattcttctcgtcctgtatatcccaggagatcactgagtccgcacgttcaagaaaagccaccaacctgtgggtctctaacgcagaattcggtcttccaaagtcggagacgatagtgtagttcggaaaaatgaaaaacttgtcggcgttttctccaaaatagctggcattgcgattagttccgttgtagaaaggagaaatgtcaaccacatcacccgtggaagttgcgaaaaaatgatagggatacttggagcgcgcagtagtgatggtcaccatacaattcagattacaggtctcacgatagagccaggtgctgccgcggctgtgccattgatccttgaccgtcacgtaacgggtactgtgggtgttggaataatcgtcgggcattaattgcatggttttgttttcatagctgtccctatgataagccacgaaaaccgtgcctgctataacgcggctgtaggaactgtagcactgactgtggctgttgatatgatgaatctcccacataggaggcgccacgtattccgtgttgctgcccagcagataagtggtgtggatgtaagcgtagctacgacgaaacgtcaaaaccttctggtagactcgtaccttaaaggtgtgcgcgacgatgttgcgtttgtagaccaccatgatgccctcgtccaggtcttcattgataggcttcatcgaggtgcagacgatattacgttcaaagcgaataagatccgtaccctgtgccatagaacacacgcgataggggtacttggtggtattgacccccaccacatctccgtacttgagggtagtgttgtagatggtctcgttaacaccatggctgaccgtttgggaagaagttacgcgttgagagactgaaccggatcgagagtgagcagcagacgtcgtatgagaggaatggtgactgtgagtagcagaagttccacgagaagtagaagatgaggaaaccgcagcacccagacagacgatacacaagttaacgcagactaccaggcaccagatcctggattccatgttcgtcgcgggccaaatccagcagcgatgaggcgcgtcgtggtctcttgcgtgttgcgcggaccctccgggaaacgcccgcggtcgaggaggaggggtacggacttggcagccaaggtcggtccggctccctgaaggcacccgagacggccgcggcggccgttagggtggagggcttggccacgggagctgttggcacgtcgccactctcatccggtctggacagatgcctgtagaggaggagatatagatctttggacttataaagacttccttcgtgacgaagcagcagcggccactctttgttatacgtgagaatcacatctctgtccgggtgcagttcgtcgcgcaggcacgcgatcgagagttgtttcccgaaagtttcattatatagtgcgacggagagcacgagctcccgcacgtgcatccacatctccttctgcagcacgtttaggtcctgacagtccgaaaaattgaaaaaacccatgtacttcaccaccatccactcactgggatacacggtaccttccgcgcatttgaccaaatcgtccttgacgtggggtagtacgcccgcgttgtcgcaggcataggccatgtccacattgtgagagaggggatagcgatcggtacagtgtgtgaagaggggcccgttacacaactcgtagatctgctgacccagtagcgggagggattccacaggcagactcttgtggatcaggttattgaccacatacaggtgctcatcgtacgtgaactgatcccccacgtccaccacgtcttggtcctggtggtattggctgcggtatagaaacccattcatgagcttagagataaagtccagacacaagggccccactaggttgacatcgatgagtttgctagtcagacgctcctgcgttttgatgcaacggatcaccttgccatagcccacctctgagaccttctgcaggtaggcgcgtttgcgcacgttcacctcgcgggtgacgttgtggatgcgggaacgcgcgtccaccaagtcgagagcctcgtgttcgtcgcagttgcgcacccgtaagccgttctcgccgccgtcgccgtcctgcccattcgcccctccccctaccgctttcttgcctcctccacgggcccggccgccgccaccgttattcctctgactgtgagtactgctgttgctgctgttgctggccgtcatcaaagtcgtacccgtccccgacatcgcctcccgtccacgcaggtgaatagcctcgccctcggggccgtcgccccccgtgccatcgggcagcggacgtcgaatctcctcgagaatatgcttgattttggtgtacatctcgttgctttcgtggagcttgttgaacaccgggttgtcctcgaaagcttgaatgctgagggatgtgatgaggtcgatgatcctgttgggggcggcaaagaccgaccccacgaacatgcgctcctccccgtccaacgccttttccccgagcacgaagatgtcctccacgtcctccccgtacagatggcgactgatgccgttcatgagcgcccggcacagctggtgatacacatttagctgctggatggtgatgcccacccgcttgacgataacctccgaggtacgggaccagtaggtaaaatccgacaaggaatatattcgttccggtatatccgtaaacaggttgtactccctcagcgcctcctccgcctcctggatgtagctgtggtaggccgatgaagaagagaataggcttttgagggccgaaaggactccagccaagtgggggatgcgcgttgtcaggtccagcaggtcctgctccaccgtctggatattcacatcggactggcttgacggacggtggaccgctatatggttgcacagcaagccctgcagccgcttgttcagcgagcggccctgattcgggatgatggtcagctcctcgtagcattgggcgcatgtcgtcccttcgacgtacacttcctgacgcgccaccggcgagatgccgcataggcgacggaggagctccagcagctgcgcgcagacctccaggccggcctccggcgccaggatcccgtacacgtagttcattttgcacaggaagcgctcgatgtcgttgagtgtggccagactgacgctgaaacggacgttgtccgtaaactggagctccacggtgtgatggcgatcgcagcgatccaaacggaggacggtacggtagaaggccgcccggtccggctggcgcgagtaggccatcagcgcccgatccagcaaagccgtatcctcgtgcagcgccttcagcagcatctccagatagagcgtcagcagcgaactctgcgtacgattctgcgccaccacctccgggtagatcttccggtacagatacactatagccgccgcgtttctcttgaacggcgtggactccgccagtaacacgttcggatcgcagtactttagacactccagctccatggcgtattcgttgcatttcgaacacactacgcatagtttctgtaacaaattcatctccatgactcgactcgctcacgtacgagacgctgtcgtccggtctggcgccggccagagacatggagtcggtgcacaaataactcgcgggccgctcgctatgccgactgacgttgacgttaatatataacgacgtcgtcgacgacgcgggttctgctcccgaagctgttgccgccgcttgcggcgcaacctcctccaccaccgccgccgccggctcctccgcctcgggcgacgggggctcggagatgaccggctgtgtctgacactcctccccttcctcaggcggcccgggcgccgacgcgaatgtcggagtttgccagcgcggcggcggtctctgtctctggtgccgcggcgctaaccttcggggctgttgctgctgttgatgatgcgacgccgtctgtcgccgctgttgcggcggtagctgatacggtgtcgcctggtgctgctgtgtcggtggctgctgttgctgctgttgttgcggtctgaaaagcggccacgggggctgcgactgttgctgctgttgttgcgatgctcgtggctgcggcggccgttgtcgcggcgtttgctggcggttacaaccggctgcgtttggccggcaataacccgctgcccccgccgcccccgctgctcccgccgacgccgccagcctcgtcttcgccggcgttcacgagaaagcagccacctcccgtctcgccgggcacgccgaagcaaatggagttgcccgcgacggactcgccgagaagaagaccgccacccccgacgccggacgccgcgccgacgccactgggcgcgaagagcgccgacaggtcgtgcacctcccccccggcggcgtccgttaatcgctgggcgtcggcgtccagcacgcgtcgcaagttctccagcgaaaagtcctccacgccctgctcctgcaacgcggcaaacttgtccatcagcgacgcggccagcgcctcgcagccatccacgaagaagagcacatcgtcggacgcggggatctcctcgcgcacgctcagaatctcgtacacggccatcacttcggggtcgcaatccaagttctcggcgtccagcgccagcatgacgcggttttttataagatccgcgtcaaaaagcacgttctcgcggcgcgagcgtttgatgagcacgtcggccagacgcgtagccaagaggtagcgctggcgcatgaaacgataatcttggccgctcatagagctcacgttaaggctgcgttccacaccgttgcccgaaaagtagccgatctgcccaaactgatagatctccttgctgttgttgatacccgcatacttttccacgctcacgggcacggtcaccaaggaacgatgctcaaaaacgctccgtaccaacgattcacgcgccacagtggcggccatgggcgccggcacgcctgcggtcttcaagcccttgacatgcaacgcaaattcggcgggcgacgagaaacgcggactagcacctaacacgtgaggaaactgcgcgtggttctgcgtcgttaagcgcgtcgtcaacccgtgcagcgagccaatgtagtctttgaagccgtagtagcagaggaatttgttatggaaacggctttccacgtaactcagcacacagtctggcgccacatccagcagatcgtgctcctgatagtcagccgtcacagccaccagaaatttgacgaaagcattgaactcgcccatgtcacctatgggcacattcttgggcaacgcgttggaacagaccttctgccaaaactgtaagcaggggagaccacattcaggaaagagtcgctcgtgatgtcgatacagcagaaatcccaagcagcccttagccggattacgacgcggaacgtgatcgcggcgaaaaaacacgctacccgcgttgcccttgcccgcgcggtagatgggtcggtttttcactcgcaccatgatcaacgtgggtaccgacagccgcgagagcttgatctccatgggcaccacggcgtacgtgccctgcgcgtacagcctaaagtccagcaggcggtcgtgatccgaattcttggacgacttgatctgcttggtgaagagaaagcccttgcgcgacgacgtggtggagaacgcgccgtgaatggattgaaaatgctgcgtcatccatttggataccaagttggtggtcaacggattgtccacaatgtatgaggtagcggtaataagcgccacgttctggatcacgtaaaagacggatctgaaataggcgtaggccagcagcggctggaaggccacggcgtagggattcagatccaggttgaaggcctgcgtggcgcccgccacctcgtcgcggctgctcttgaggcgcacctccgaaacgaaacccagggcctcgtcgtccacaaacttgttgagcgccgaaaagacggccacaaagtcgcttttgccgtgcgcgctaaaggtatcctcgcccgtcacggggtcgatgagccgcatcttgcggcagtaatccaagatgcgattgagccgataggtacggtccacgctagcgcccagcatgcgaccgccgcgccccatcattcccccggaatccccgccacccccaccaccacgaccgccgcccagaccgtcgctcgggcccccgctcacgtcccgtccaccacccccgccagcaccgccgcccggaaccccgtcgtcacctttgccgtccaaacccccgtccttggcgtcgacgttgtaacgccgaccgaagctgcccaaaatatccacgtcgttgagaaaacgcgactgcacggtgatcacgcagggctccttcttgggctgcttgggcaccacgggcaagcgggtgcgcacccgcacgaaggccgtctgataacacgtgtggcaacaagtacccccacaggcctcgcacagccccgcggcgcagcccaccaggtgattcgtgagcgtcgacgaacccgacaagcccgtgttatacaccgagacacgatttagataccagacgaagcccgaaactagctgcggacacgtgccacacaccaacgccaaatgctgcggcccatagcgttcgtccttgagcggcgcgccttgaaatttgagcaccttgcgcgcgtcgttgtagacgtcttcgcaggccgccgacaacccgttggtgaactgaatagccttgagcaacgtctcctgactggccgtaccgccggcgctgggatgccgcgccgacgactggagatacaccagcctgtgctggtagagcaccgaattagcgctgaagaccaaggcggccacgtgcgtcgagagatgcaacttgagctcggtcagcgcgcggatcagatcgcggtgatcggttgcgttggtcactaaaggccactcggaaaagagcatagactcggcaggttggtaggccgaatcgaaaaataccgaggcaaaactgaaggccaactcgcaaaccaccgcgtcactcagcatcagatgatccttttccagactgctgagtcgctggctcatgtaccccaagtagcgcttatgtggcgccagcttcaccgactgctgactgtcgtgcacaaactgccgcaacgccgcctcgatcagcacacgcggctccgagaagcgcagcgattgacaccatgacgtgtacacgtagtagaaaagcgtctcgcttacggccggcacgtagagccctcgcgcctccacaaaagcgctgcgcgcatccagcgagacctcgtcggcttcggcgtcaagctgcagcgaattaaagagcgtaggcgggtacaacggcacgcgcaccgcctcgccgccgtacagtcgcaccgtggtcgcctcctccacgcatggaatcagctgaccggcaaagagaaactccttcaagccgttgcccaccaccacgtgcacagtcgtctcggacgcctgacagcccaccgccgcgcacaacgccgacagatcggtaggcacgcgatccgcctcgggcgtgtaggcctccaacgcgtacttctggcgggcgtcctcgcacaaccgatgcacgtctccgtgatcctcggtaaaagccacgatgccttgcgtatgatgaaagtagagcgcaaaaggacagaaggacgtgactttcgtgagcaccccgccgtcgtaacaaagcacaggcgtgcgcacagagacgccgaaatccgcctccaccgtcagccccgccaacagaggagcgatcaccacgctcgaggaacggtcgcatagcgagagagtggccagaatctcctgcgtttctgcgttcaacctgctgaagtagagaaaagccgcgggccccaccggcgctagcgcggttagttcctcgtggctcatggtggatgaacggaagacaatggctacgccgccactgagtgaattttataccaaggaaaagttcagcacgtcatgtttgacgcacgacgtctgatacaccaccgtggccaccactgcggtctggctgcggttgcggaccaccaaaggcgacaaccgcaacgatcccagcaattcgtaagaaaagctaaccgttacggtcgggcagcctctcgcagccagaccgctagccgacgcacccgcccgcgaaaatagcgtgatgttcgggacggcttcgcgtcaccgcaaactaacgtcggtagtcgcgcacgtcgtttatcctcagcacaccgtccgatcacaacccgttttcccactcagtcgcacaagcagcacataaaaaccccacacagtgcacgtgaaaacaacgtccctagaaaacggtgttttctgtcctaccgtcaccgggccacacaggcaaatcccgagcccgatccccgaaaacaccgtacggtgtttgtggcctccaaaatcacatcagataacaaaccgtgaaaagtcacgtttcacgaacacggtgtttttaaatcacaaagaaccacctgacggtttacaagcagaaacaccgcaccacggtggtacaagcgcggtggatctggtctcgcaacctcaatcgccgctatcaccaccgactttcgctgcgctccgccgacaaaacgccgtataagctacacaccccaaaaacccgcacgcctatgggcgccaaacgtgtgtattatctcaacgtcacgacacgacacaaacagcgtaacgtggtttcccgaacacgtacgcggcacagacccccgacacgtactcgaagaccttacagtttacgagtcaataaaacaggaaaagatccgaactttaaaattgtgtatttttattttcccatccccctctttttaccaaaaaacacatttttcgtcttgtaaaaagtaactttcgcccattgccatgaaacaccgtgatggggaacggtgttgtgtgtcgactgacgtcactacggcgatcagtatcgacgtcgtgtatacataacggtgcccggtgtttttattcggggcgttgtcgcgtcttgatgtaatgtaacctgaaaccgccgtgtccaagaatgcggaagccagcgtgtaatcataacggggttttgggtacaatctgacgacatctggcggcgagcgtacaccatcgaatgtggcgatcgccggctctacgtcacaatgacgcaaaaacacactgtaaaacacgcgtagacagctttcctggtcaacgagcgccatctggtgtcggcataagaacaggcatcaaccccgtggccggcgaggcggtgagcacttttgctggtcacgtgaccatcagcgcaggaagcgaggcccgtagaaccgcccaagaggcggtgccagatgccaacgtcataatcacaaggtgatttgttacgtcacgcgcgcgcacgcacgcgcgcgcggtagaatacagcgatccctagtgaagccacacccattacgtgtagccatatccgcttacgtatacagccacacccctaggtacgccaccttatctaccaatcatagaaacggatatacaatgacccctccctagactccaccccttgtacggaaatttcagataggtggaacccgttagggttccaccgtcctcggtgtacgtacaggcttctccgtctaccggaaatatacacctgctgacgtagacgctactcccggatacgcgtcataagctactggaccctaggggggagtgtctacagggctacgtgcacgcccccttacttagggtatccgcccccttcctctgttttggcctagtaaacttaacgccgccgcttctcacgtgacccctggcaagcctacgtcacactcgcgtgaccacacccactccggatatacgtcatcctgtggaattccggacatacggtgacgtagcgagcgtagcgagctacgtcacgtatgcgtacgtcacctccggcggaaatcatctctgatgacgtagcgagcgaagcgagctacgtcatcagtccgttttacgtataccgggtgctaggcgacgccccgtaggggcggagcctagcttccacccctaggatgcataccctatatagcataattcttctaacgaaacgttctacgaaaacggactggcggaacgggaaccaccgtaacccccccccctcacccccccccttctcctccggaaccggggggggcaaatttttaccaaatttgggcaaccatgttttccaatgggacggcgtttccgtgcgcatgcgcagtcggggcgaatttttggttgtcagggcgttgccacgcggattatgggatgggggctcgagtgcgcatgcgccggggatgccgcatggaaagcctatatataaggaggggtgaaccaggggccccggtgcgcatgcgcggaccaggccccgcgggagggtcgccctgcgcatgcgccggtaaaattccactgggtgtgtgtcgtgcgcatgcgccagtatttttccactggaggcggtcagtgcgcatgcgtcggtaaaattccactggatgtgcaccgtgcgcatgcgccggtatttttccactgggcggccgcacctagggagcgcgagccccgtgccgggcatgggccgcggcggtggaaaattaccgctccgcccacctaggcggggcatcttaaaacctataaaacccggcgtacccgccgccccccggcgcagtccgcggcagggttccggccgtgctgcggtccgcacgctgcgcccgctcccgcctgcctcccgccctaccccccaccctccccggccgaggcccggcgccggtccgtccgcgggcccgtcccaccgccctggagcaccatccggggccgtgggccgggcaccgggcgcggcccgctccggacctcggccgggggtccctcccctccccccgctcgacccccccatccgacggcccggccgggctgggacccccgcaccggggtcccggttcccgtccgcggcccggggggacccgagcgggggcttcccacccccaccccgctcctccccgggctccggcccgggatccctcgctgctcccggcgacctccgccggcttcccggtccacccgccgcggaacggacgggacccggggtccgcgcccttcccctccccccacggggggctgggtcacggaccccggttcctaggctcgttccgcggtgggcgaccggggatcccccacccagctccccttcccggcccgccccgctggcttttgggcccctccgggctttttttccggctgggggtcgcggcgctcggccgacgacgacggtaggtgggccgggtggacggtggtggggacgggcgacgccccggctcgacggcagtcggtcccggaaggttgggggctgggggcccggtcaggagctccgggagcggggtcgaccgcgacggcttccgggtctcgcggcggctccctctcggcggctccggttgggctcccctcccccctctcgagggtccggccgccagtcgtgaccgggggtccctcggcctagccgccggctctcggtccgccttatcctgggcgttggccggtcccgtgacgctcccctcccccgctgctccccaaaaaactccgcccgaaccgtcgcggcttgctggccctgggcgtggtcccccactcccctccccccatcggccgcccagccggggtcggcgcctcggaccccaccaggctgtggcgtgtgtgctggccgatgcggcggcgaggttgggtgtggccggaagcgctcggggtcgacggtgggccgtcatgacacctcaattgccgtcagtacgcccctccacaatcaccgtccctacacgatgggcccggcaggtcacccaacgttggttcaggcccagtcgggtttttccccggcacaaacgcacgtccccgtgggctccacgcgttttccaccctttcctggaggggtccggaacaccgtgaatccgcggggagggtctcggcacgggccgaggagaccacgaccgtcccacccggcgtgtcgacccgtccgagacccgggaagggaacaggccccacccttttttttcccttctccgatttgccgtggaaaacccgtgaaccgatacgggtacagacggccgaaaaaattcgagacgacaatacgacggcagggcgtgattttcttccccatccgacaaaaccgtgtccctcaaaattccccacctttctctgttcaaatggccccgaaactgtaaaacaccgttcgaccgcaccccaaccggcgccatcttggtgaccttctcgacggttctctcgctcgtcatgccgttctgagctccgacatggcggacgagagaaaatggcgtcgagagcataggagcgttttcgctccaggcgggtaaaagaatagcacgataacttttctgtgctttttttgagacgttttagaagagctttttttctgctcagagcgaaaaaatgatagccctgaaaatctcgacgagtctggccgagcggcgccatcttggaggaggggcgagtcgcgggcaccgcctcggtaccccctggccgaggcgagtccgcggtcgccgcctgttccgtgatgctacctagagggcgccgtcgaggcgactcttcctgttttcgccctgagggctaacggtcgctgacgtcaaaccatctcgtgctcgctgagtcacatccggttgttgacaagcgatggaggaccgcacccaaagtgcgccctctagtcatcgcgcctgaccccttttataaactgctcgaagaaaagaacaccttatgtgaaaaaatacagaatgatgacaagttcatccaacacaaccgctcaacaacgccatatctatcagtgtccaaaaactatcttctatcctttgaaactataaatgctgcctatatacatatttagtatccaagactcttaccacgtagacgaaaagaagtgatacaatgatcttgacgtgtatcgtctatatcgtgctagatatattcagataagacgcgcaaaccatagatttctcatcagtatcatgaaagacctatagctctatatacgaacctagtcattttaggacagccgccggagaagccgacgagggatcgggcgggtgcagccagaacctcacgcccgatcccgcctccggtaggcgatttgcatctgtttggtaaaaagctcataagtctgtatgtgacctatatatatattatacgctatgtacaccgaactgtcgctgttgtataagaagaaaaaactctccatatttatatcgtctgaatttttgcttgatagacacgtgtttggaactctgtccccccacgttttcactgtgtataacaaaaatatgtgtttctcaaaagatcttgaggtgtttgaaaacgggggaaacccgcgtttgggtgcgctaagccccggactgggacgtagccggcgtccggcacctatatttttctattttttttacaaaatatatgatgaaccaagaataaaactctagctctcgtctatttttaatatgctctacttagaacctttttaatgacagaatgaactccatgttatacgctctttatatagtttctctgcactaacctttaaaatcgtatccttccctgttgtacaaatcatcttttgatacacaatgatgacctgatatccctccatatatatgatcggatattattccgttagacttgtcctccttttttttcctcatctcctgtatctggagatatatgttgaccaccaccgccatgaccaccaaaaagctagccgtcacgactagaaatgtgtaggattcggactttccgttcgagaagaaagagaccgcgtctctggacgctctttttgtcggtctgaatcgacccgggatacgtaagagagcggccctacatcggggggcgctcgagaccgacgacgttccatctgaccagaaaaaaaaaaggcacccctcggtagcgacctctcaccatcgtttgcccgtccgcccgtccttcgtagccatcatcatcatctcaggctctatcggtaccatcgttgtcatctgaaaaaaaaaaactgcctcacccacctgcgtaaaaacaccatctttccggaggtgcggtaagacgggcaaatacggtcgtgccgaggcaaaaaaacgcaccatcgacaccacaccctcatgagcaccacctgtcggtgttggtcgtcctccatcgttctctacgaacatctcgacgcccgggtgacggacgacggcaagacgtcccggagaagacggtgttctctcgggcggtacgctctctggatctataatatctatagtagctaaacgagactgtgagtacgacgaaccacatcatcttttttttatgttgctcctttagaaaatgacttatgtcgacgacactcggcatcagccatctcgtgaaacacgctcgcttttcgtctctccaaggaacactgggtccgctgaaagggaccgtgtaccgaccaaagcaaaaaacacacacgtagtaacatgatcaaccacgtctgaatgacacgaaaacacaatcgtataacgctctattcatggaacgaacttggaataaaaaaaccatcgcaggccagaggctaagccgaaaccgtccggggaagcgggcgcgagttttccgacttagtctctggtgctcgttgagcctctttttttttcctgattctctgaagaatcaccgtcacagccctatgacgcgaaatcaattgctagaacataaacgttctcaacaggtatgaaatgaacaaactagatgatgctataaccttatattgtgtgtatatagataggtgtgaaatttgtaggataaaaagtgtcgttgtatgatgcacaacgatcgtgaaactggagactgtagctctctaccgaatgcaaatacacaaatgacatcgattcccgtccccacataaagaaatgtgctttactgtgaaagaatgaagaagattcttgttcctcgtacgacggggccctcgctcgtcgtacctcttcccccctccgggagaggggacgtcggggccctccgtcgcaccgggccgaagccagtgaaatgtttactacactgtcatcagaatatatgatgtatattatttcctccaaactcctcaccatagccaccaattcgcatcacttaagaaagtagtagcaaccgcggcggcggcgaccggccggtcgtcgtctcctcgtcctcaaatgttgtacatgtgcagaaaaatgtgtaaatacgtgttatttatcccatgcgtcttgtacatagatatatgtttttatatacgctatttatactttatatatccttttgcataaccatagacagtcaaggattttaatgatttgctcatccgcctttgagccatcgcttaggagttagttcctctatgttctcggcccaccttttcgactacagtagcaaacccttgtactaccaccccgataaaaaccacatcatcatcgtcaccacgacctggaaacgacacacgttcccccccaatcttgggcatgtgtatatatataaagaatgggagggagaggacgtggggctcgagaagaaataaacgccaagctcgattcgaaccaaaaaaccacatgtgtattgtgctttttttgtttttacggtggggaaaaggagggggccgtcattaacgaaaaccgtgtatggggtccggacacgaacagtacacagcttatggggaaaaaagctcacagagagaaaaaaacaccaagctcaggcacgcgtacatcattatcatcatcggatatctcaccacgagtcatagtagtaccaaggagtgtgtaacaccattttttcttttttctttgtaacgggataagggacagcaatcatcacgcacaacacccttcactctctttttagtcatccatatcatcgctgtaacacagcatgtcctcgtaatcgggcgtctggcagcgcattaccaccgagtcgtcttcttgcggtaccggtggtggcggcggcggcggcggctgctgctgggttaccgtcgtactgtgattaccgttggcggactgcaccgggatgataggctgcttgtggggaacctggggtggactgccgccgtgagaaggcgacggcgtcatcaagttaagctcaccacggtgactccggacaccggcgaggggccccgggggactgggagggaccgcggtcgtcttgtagacgacggtgtccccgtgtcgatccgtggctcgtaccagatcttgactgctagcgtcgtcactgtcttcgtcctcttccagctcgccctcagagtagtgctgctgcggttgcgacggtggctgggcgggaggagcggcggcgatcattggagagggatgtcgatgactcccttctctgtcctttttatcgtaggctgtcagcgttgctgggtccgtcctgctttccatatttgcgcattgctcatcggtgggatgaatttggtctcctccccgctgttgtccgccggcagtggcgtggttgctggcggttgtcgttgtcgtaccggcaaagacggtgagatccaatagtgactgctcgtcgaagggacagtacgctatcatgaaacgatagggtgccaacgcgcgttggatgcgcagttcgcacatctcgttctgacactcgtggcactgcagggcgcctaggatcaggtccgagacagcgccgcagcggtaggtacccatggcgttgttagtatcgaactggtcaaaaaattggggcgtaccggtgacttgcaacgcgcgacggcgtagcgagacggccacgcgcgagaaagagcacacgtaggccatggcgcggtgcatgggttgcgagaaggtctcgggcggacgcttctgcagatcgcagacgtcgtcgcgtagccaggcgctcatttgacctggctttttgactagccgtttgagcgtgctgcaatggtcgccccagccgtcctggtggtccaggatgcagcccaggtccaggttgttgagtttgttgaagagcagctgacgcatgccgcccaccgtctccagatagggatcgtgcgggttgacgggtagcccgtgcaggtggtggtacttcatgtagctgagcgtttcgtcgatgatggccagcaacgtgtgcaagttgggagcgttgtacacggcgaagatcttttccaccaccagcttgcgcagcaacggttcctccagccaatcgaactgttgacggatgtgcaacaggtagtcggtgtgcatgagctcgtcgtgtgacagcaggatgcgaccgcgcggctgatgatcttgcgggaaggcggtggggaccttgagatcggcggggtagggtgccagacgtagactctcggccgtgtagcgctgaaggtcgtagacgggcgaggtagaactcggtgaggtacccgacgaggcggcgccgcgctgcagacgcgctcttttcttcttttcgatcaaacggctgagttgctgtagttcgtcctcgtccatggcgtccagttcgtcgtcaataagcgccagcatctgttgttgttgcggtccggtggacgatccgtgatgattattggctgaagaggggtgagaagaaccgaaagtcgtaggacaactgggaactcggcgacgaagatgcgtcgaatcgccgccgtgatggtgcggttcgccgtcatcgttgtcgtaagacttaccgtagtgggggttaaggggcaccgaggcggacgcggccacgcgtcgcttgaaagaggaggacgccctatgtccgccacggaagcccgcggtgcccatgatgatgtgtccgccggtgcccccgagtgcgtggcgggaggagggtggaaggggaggaggatagtggtccggatcgccttcggtatcatcgtctttgctgtagcggggtcgtcgtgcggggacgcagggtcggtgatgatgcgaggcggcgccgacggtatcttccgcgagatggtattcgctggcggctgctccgttccgtgtcgacggcgaggttggacttcgctcgcgtcggaacttccgtggcacgggttcgtaatctagacagaagcgccgtgcgcgacgggcgcggcgttcgcgctcgctcagggaagataacgacggagcgtcgtgacggccgcgtgagtgcagctccatggccgccgtcgctaggaaggtcacgttcgggcacgctgatgtatatatagatgagaccgctgccggggggcgggtcaccggcgccgtggaaagtgaggctcagacggcggtcgccggcggcatgggcgcgtcgggcggtctgattttgatggaaatgtggacgtttttggcgttggagtgacactttttggtgaaacagcggctccagaggctggcccagagcgcgtagctgtgctcggtgcgcaggtcgatgaacacctgcacggtctcttgcgggttgcggtgcgtgtagttgagacagcgaaaatcccgcgtgcgcgcgccgtcgcgccgcttgacggccacgcagcaggcgccgtggggctgaaagaggaggacgtggggtgcggtaaactgctcgctgacgtgcggctcgtagtgttgcgtgaggtgctcgagcagcggcggccacacgcgggtgacgacgagccgctgcaagtccgtgtcggaaatcgcagcggcagtggcgccgtcgccaccgtacaggtgataggcgagcacctcggtgagaccgcggcgtcgataacgcgtcacgttaagcgagcgcgtctcgataaagttggcttcggtcgaggggcagattttgtcgcgcacgctgagaatgacgcgtggcggcggcgacaggggcaacgcgggcaggtcgtgcggcgggtggtggtgaagcaggttacgcagatccagttgggcgcgcacaaagcctagcgggtgttcgcggtaggcgtcgggcacgatgaacagcggcaacagacggcgatgcatgaaatagccgtcgtcttggtccattttatacatgtagggcagacgtacagagcgtccatggtggtagatgcctgtgtctaggctgctctcgggatgcgagatggggtccagcagcgtgtgcagttcggcgtcgagacagacggcgtgattgagcacctgcgccacggcgcgtaaaacgctggggtgtacggctacggtgcaggcggggaacggcgtgatgatgcgcagccccagtttgcccttgcagcggcagtaagggggtgacgtgtcaacggaggacgttggtttttgaaaaacgccgttatcagggacgttatttttgtcctctttcccgtcttcgtcttcctctgtgtcgcgctcgtcccggtaatcgagatagtcgtcgtcatcgaaaggcgcgccggccgcgtccacgggcacgctgttgggtgggcacgcgcttttgaagaaatagaccgggtgccggtcggggtgcgtgtagccaaagaggctcgcccatacggtcatccagacgcgtcgtagtccgcgacataattcaaagacggtgtgtcgcgccagaccggagacgccgtcgcgcagtcgtaaatcaaagtcggccacaaaattgaagacgggcagacgttcgttgaagacttcgtgtcgcgtgtagtagaactgtgtctcggggctggtgctggccacgtcgtcgtcgtgtagccacacggtctcggtcagggcctcgtccgagaaacggctgtcgggtacgtgacggagcaggtcgcgcggaaagaggctgcgatgccaggtttcggaggccacggcgcagaagacgtgctggtcattgggcaggtgtacgcggtagacgggcagcggtcgctccagcagcggtgccagcgcgggctcgggtagcaggtagcgacgttgcgagtaacgcgttagcgtgccggtggtgtaggtctgggctgtgcgcagcgaggcgcatagacgtaacaagccggacagggagcgttccagtggcgagaagacagactcggaaagcgtgttgatgcgttcgagctggcgcgccagctgcgtggaggtgccaaagaagcccgccaggtgcgtgccgtcgatgcggccgccgtagccggccagccccaggccgtgcgggctggtcgccgagtggggggattcgtcgagacccagtaggtgcgtctccacgtagtcgtgcagaaagttgtcgagcgagaagtatttttgcatgacgtccagcagctcggtggaaagccggcggcccagaaaacccggttcgcgcgtgcactgcgcttcgggcgccgcgtcagcgtcgtaagccaccacgcgccggtactcgagcaaccgcgcgcgtgccagcgccgtgcggtaggccaggtagacgtagtgcacgcagaccgtgtcgggcagacgcgcacgttcgcggaacgcgttgatctgcgtgtccacctgctctagctcggtgtagtcgcggcggttgcgcgccacggcgtacgccacgaaagcggacacgcgctgacggaagggcgagcccagtagcagacgcgcgaactcgcccatggaggcgtgcgtggggatgatggtgcccaggtcgcgcgtgcagaagctgcgcacgtactcctccacggtggagatggtgctgtactggccctcgaataggtagtaggccatggtcagcagcacctggccctcggtgtgcccgaagacgctgatgaaccacgagggcgaggtggggcagaggaagacctggttgagatgacgtagcacggccgcgtggtgaaagtacaccaggtgcttgaattcgcgcacctcgccgccgtgttcgggcgagagcacgggcgtgcggaagagatgccggtagagcggttgcgtctcggcctcgtccagactggcgatgagcgccgagagggggatgggctggcgcgcggccaggtagcgcgagagctgcagcgtttcgttgttcacggcgaagacgggcgccacccgccgcgagtccgagcacttttgcgtttgtaggcagaaataaacacgtcgcgagacctggtgtttgaccagcagggggaagacgcagtggtccgtcggtgtctgcgagagtacgttggcgactatatgagcagaatcatactctgttgcgaacagaacgagcgtcatcgtcgcgccggcacgatgcagctggcccagcgcctgtgcgagctgctgatgtgccgtcgcaaagccgcgcctgtggccgattacgtgctgctgcagcctagcgaggacgtggagctgcgcgagctgcaggcgtttctggacgagaactttaagcagctggagatcaccccggccgacctgcgaaccttttctcgcgacacggacgtggtgaaccacctgctgaagctgctgccgctctataggcaatgccagagcaagtgcgcgttcctcaagggctatctctcggagggctgtttgcctcacacgcggccggcggccgaggtggagtgcaagaaatcgcagcgtatcctagaggccctggacattctcatcctcaaactggtggtgggcgagtttgccatgtccgaggccgacagcctggagatgttgctggacaagttctccacggatcaggcctcgctggtggaggtgcagcgcgttatgggcctggtggacatggactgcgagaaaagcgcgtacatgctcgaggccggcgcggctgcgacggttgcaccaccgacgccaccggcggtcgttcagggggaaagcggcgtccgcgaggacggggaaacggtcgccgccgtgtcggcctttgcctgtccctcggtttcggactcgctgatccccgaggaaacgggggtcacgcgtcctatgatgagtttggctcacattaacaccgtctcctgtcccaccgttatgaggttcgaccagcggctgctggaagagggcgacgaggaggatgaagtgaccgtgatgtcgccgtcacccgagcccgtgcaacagcagccgccggtcgagcccgtgcagcagcagccccagggacgcgggtctcaccgtcggcgttacaaggagtcggcgccgcaggagacgctgcctacgaatcacgaacgcgagattttggatctcatgcgacacagccccgacgtgcctcgggaggcggtgatgtcaccgaccatggtcaccatacctcctccccagataccctttgtgggttccgcgcgtgaactcaggggcgtgaagaaaaagaaacccacggcggcggccttgctgtcctccgcgtgaacagcctggcacgttttggaaaacgtacgtgatcacggacacgacgagcacggggtttctcatagacgtactttattaggtcagggatgacggggaggtttcgggccgacgtcaaaaataacgtcactcgtgttgacagggctttctgcgtcggagctcttttcatcttcttctgtctcgtcgacgtcatcgtctaccggcgagggtgtccgttgcagcaacgcgtgctcgggcgtgtgggtgaaaccgatgtcgggggtgggcggcacgatcatctgtcctagggggtgactgcccaccggcagataggtaaagcggtgggtggtaaaaaccgctttggctacggtggtgtgtggggagatgcagacggtggtgtgcgaagtgttgaccaccgtcacgccggccgcggtacccgggagccagatggtgggtcgaatgatgagatccgattgactaaactggcgcacgcccactatgagggcgcagataccgggcgcgtgcacgtaggccgcgtcaaaatagacggtttgcgtgtgacccggaccgatcaccagcgtctgacgggtacgtaatgaaaagaaacggtgttcgttgggcggcggcaagttcatgagctgccagggttctggcacaaaacaggggaaaacgccgatatcgccttcgatggtgcccggaaagatggactgaaaagtgtcgttgaggttgacgacatccaactgcgggacttgcagcccggattccagcagctcgggcatgcaaacgaattgcgcgtccaggcatttgtaaaaggtaatgccaaaaaaaccttcggggatatagaggctgactcccagcgaggtgggcactttgcgctcgcgtgatagccaaatgatgtgtttattgtaaaaagccagctgcgtgtggcattgtttaacgatgaaactggaaggcatccacttgtagggaactttgagcggcgacggtaatggcgacgacgcttcatcctctcccggatgctgctctttgtcgtatttctcctcggtcgattggggcagcgtaaatgtggtttgaaaatcgctatcgctagcgaaacgcacgcagtaacgcatgttgacggatttctcggctaggatgatggagcctgatgacggtgcggactcttccttcattattaacgtaggggtctcccagaatcgctgaaaacgggagcgcggcagccgcgacagtaccagttgagagtcgattctgtcggtcaacattgtaagcatcgtggcggtggtgtgatggagtggaaaacagtgatactaggtgtttttgttttatcggtggcagcggggagttctggtaacagctcatccacgtcaacctccgcaactacgttaaaatcgtccagttctagcgtgtcaacaagcaaattgacgacaactgcgacaactacgacaactacgatgagtacgacctcatcgacaactaccactaaaccaagttccactactcacgaccctaatgtgatgaaacgacatactcacgatgatttttacaaggcacattgtacatcgcatatgtatgagctttcactgtccagcttcgcggcttggtggactatgcttaacgctctcattctcatgggagctttttgtatcgtattacgacattgctgtttccagaactttactgcaaccaccaccaaaggctattaagggtggacagatttacagctcgacggtgttccggcggggtaaggtttccataagtgggtgactggagactaaagttacggatctcatctagaaatagcagcgagtctagatagtcccacaggggatctataaacgttctctgaaatcccgttgatggtgacgtaggtgtagtttcggaagccgttttgttttccacgaacatggtttcgttgtaatataaggagctcatatcaagagtaccgtaaatagtgtacggtgtttcattacggattagtacatgcgtgtttttcataaattctgatacggcggttcggttgcggcttgattcacaaaaagggttttgccggtaacgtagagtggtatacacccacgtcgctaggtcccttaattgcgtggtcataatggacttcataaagctactatcaggacgataagcaattgtagacgtggaaacccgccttgcggtggtagtaacactataagttgcgttagtagtgacgttcagagcggttgacgttgtatagggagaatatggcgtagtagtactttgagatttcttactctttttttctgattgttctttgactggagcttgtttacgcttgagttttcgcatagtgtttttcaacttagtaccgttaatatacttagggacgcgaaataaatttcggctcatggcgttaaccaggtagaaactgtgcgtacagttgcgttgcgcgtaacgtagaagcaaggcggttaggcctaaaaagtagatcgtttgactatccacgtttactttcttggaacctacatataacttcgtgttccaacgtggcacattgaaaaacatggggttgaacgtggtgaaattgccgcagccttgttcgccagtatcattacgtttggaaacgtttagcatttcggaaagacaagtcatggaaggcaccgtaccgcaagatgggggtctgaatgttattgttttagccgtatgattgtattctgagaaaacgtacttagccggttttcgaagctgagtgctataaaaatcgaaccaaagataggtaacactgttattttgaatgggtcccgctaaaatgtaataccgtggaaactcggtcatgttcatagtcagatttttaatgtgttgtctggtcatattaaagtattttgtatagatatccttttctagttgtttcaaaatctctaatttgaacttgtctagtctttgcttgcctatcgtagacagtactttacctgaccagtaacgtcctacggataatcgtaccgcagccctacagtttatgaaagagaatagcaggaaagttagcgacataaggaagaataaattaaaaacacctctcatctctccttttctccccatgacagaggaggagaccccgcaccgtccgtctgccttgtggtttggcttgcctgcgtgtactcactgctgattctggtcgttttgctgctcatctaccgctgttgcatcggcttccaagacgacctagtttcccgcaccttggctgtgtaccgagcttgtatccagggaccgatatgtaaccagacccacaacagtacctcgtaaataaagacgcacacacctcacgcatatagtaccatcacaccgtgtggcgtgtactttattacaacgagcaagagtgccccctaactattggggcccgtaccgttttagaaggttttgtgtgaatgtctttaacttctctgtcccttttctcataaactgtcaggtcctacagtcagcatgtcttgagcatgcggtagagcagatagatgccgatgatggccgatagcgcgtagacggacatcatgaggagacgactgtcggtggcgtccacgacaacgtcagttacttctaggaccgtaccgtttttcaaaagcatgaggtagtgagttcgcggagatgagaccaccacttcgttgtagggatccagggcgaaaaggacgtcgtccgagtcgtgcatgtacatgatgttgatgacgccttgcgtgtcgtcgtattctagcagggcgctttggcaaaaggcgcagttttctagggaaatgttgagcgccgctgtgatgctgtgtgtggtatgcatgttgcgcgtcagttcgcatttagtttgactgtccgtctgggtgatgatgaggctttggcctacgacggtggtggagacagggtaggagatacctttgatcaggtactggtttgttacgacataactgacgtgttcggagacggtcagcgcggagaaggattcgcctagtggcagacaaaacaggtcggggaaggtttccaacgtgcttggttgcatggtagataggatggagagggcggcgggaacggtagtggggacggtggcatcggggaagagacgtgtgaggcgttcgagcgagtgatcgcgtcgcccgctactggaacagggtgtgtacaggtcgctgaggtattcgtggtgcggatgagctagcaactgcgtaaagtgtgatagctcggccaatgaacagaggcccgtttctacgatgaagatttcgcgtctctccgtcgtatgtaccagcatggagtggacgaggctgcccatgaggtagagttcttgacgcgcgaaggctgaaagaaaagaggccaggtgcgttttgtgtagttttagggcaaagtcggcgatctgtcgtagtgcccactgggggatgagatgttgctgattctgtttagagagtatgtagaccaggcgtacgaggctggtgatgtcggtgatctgattcggtgtccaaagggctcgtttggccaggtccacggccgtgggatacagtagcaacgtggtgcgtggtggtgtttgtgagaggcaggtgatcataaattcttgtatttgtaagagtgcggcctggcggtctagggcccgtgggacggagacttgggcgccggcctcttcttgtcgggctgctgcgaacagtgctaatgcgtaggcgaaggccatttctaccgtgcggcggtccagcatctgacatcgaccgctcttgagtacatccacggcgtaacggtgaaagctgttacgtagtagtgcgctgaggtctaggtagttgaagtcaagtgcggcgtcaagaaagtccgggtctttgagataagagtgacggttcagttgatctttcttaactagcaccaggagctcgtgtttttcagtttgtcgtagtataaagttgtcgcgttgatagggcgctttgaaaagtacgcgtggaagatggccgaagataagcagcatgggtgtgtcgtcgtctatggacaccgtaactacgaagaagtcctcggtcagtgtgattttaacgtaacgtagttcgtcgatgaggtaaaagccttggtgcaaacaaggtgtgacggtgctgaatagtagatcgtgtccatcaaagaggatacaggtctggttaaagtgtggtcggtgtagtcctgaggtggtatgtgattctgtccagccgtgtggagtggtttgcggtggcatccaaacgtgaggtattgacaggtcaatgggcggtggcacagtggtgggctgttcacctaggctgtcttgtgcctttagctgctgcgaaaaagatcggtagctggccaggtctttggataccagcgcgtaagtgttaagtctctgttggtatctttccagggtttcggtcagatctacctggttcagaaactgctccgccagaggacccgcaaaaagacatcgaggcatatggaatacatagtattgattatagctttggaaaaagttgaaactgatggcgttttccctgacgaccgtgctgttacggaggctgctgttgtaggtgcactgggtggtgttttcacgcaggaagcggatgggtctcccgtaggtgttgagtagtaggtgaaacgcgtgagggtccagcgcttcggatgcggcgtctgcgccatatcgttgcgaaggtaggtgactgaggaggtagacggcgaagacggtgaggtaggaggggaggccgggccgcatagcgcggccgcgccgctgggttcagcggcgtgatccaggtggtggttggcgttacacccgagagaaggagaaaaaggatcccaggaaggagcacccgggtgcggcgctacgggttacaaaagtcgcgtctccgtctatttaatacgatgtcattggccgctgcgaagggagaagaggggacacgcgaataagccatgccgtccgggcgtggggacgacgctgatttgacggggaacgctctgcggagattgcctcacgtgcgtaagcgaatcggtaagcgcaagcacctggacatctaccgtcgtctgctgcgggtctttccctcgtttgtggcgctcaaccgcctgttgggaggccttttcccacccgagttgcaaaagtaccgtcgccgtcttttcatcgaagtacgattaagtcggcggattcccgactgcgtgttggtgtttttaccgccggactctgggtcgcgcggcatcgtgtattgctacgtgattgagttcaaaaccacgtactcagacgccgacgatcagtccgtgcggtggcacgccacccacagcctgcagtacgccgagggcctgcgccagctcaagggcgcactggtggactttgattttctgcgtctgccacgcggtggcggtcaagtctggagcgtggtgcccagtctggttttttttcagcaaaaggccgatcgcccatccttttatcgggctttccgctcaggccgttttaacctgtgtaccgattctgtcctggactatctagggaggcgtcaggatgagtctgttgcacaccttttggcggctacccgtcgccgtcttcttcgagccgcacgaggaaaacgtgctgcgctgccccgagcgcgtgcttcggcggttgctggaggacgcggcggtggcaacgcgcggcgggggctggcgcgaggacgtgctcatggaccgggtgcgcaaacggtatctgcgtcaggagctcagggatctgggtcacagggtgcagacttactgcgaggatctcgaagggcgcgtgtccgaggcggaggcgttgttgaaccagcagtgcgagctcgacgaaggaccgtcgccgcggacgctgctacaaccaccgtgtcgtccgcgttcgtcgtccccagggaccggcgtggcaggagcttccgccgtcccacacggtctttatagtcggcacgatgccatcacgggacccgccgccgccccgtctgacgcggcgaccgcgtcagcggccgccggtgcttcttctacctggctggcgcagtgcgccgagcggccgttgcccgggaacgtacctagctactttggaatcacgcagaacgatccctttatccgctttcacaccgattttcgtggcgaggtggttaacaccatgttcgaaaacgcctccacttggactttctcctttggtatctggtactatcggctcaagcgggggttgtacacgcaaccacggtggaaacgagtgtaccatctggcgcagatggacaacttttccatttcgcaggagctgctgcttggcgtggtcaacgctttggaaaacgtgacggtgtatccgacgtacgactgcgtactctccgatttggaagccgccgcctgtctgctggccgcctacggacacgcgctttgggagggccgcgatccgccggactccgtgacggcggtgttgagtgagctacctcagctgttgccgcgtctggccgacgacgtgagtcgtgagattgccgcttgggaaggccccgtcgccgtgggtaacaactattacgcgtatcgcgactcgcccgatctacgctactacatgcccctaagcggtggtcgccactatcacccgggcacttttgatcgtcacgtgctggtgcggcttttccacaaacgcggcgtcctccagcatttgccgggctacgggacgataacggaggagctggtgcaagagcgtctgtcgggccaggtgcgcgacgacgtgctttctctctggagtcgacgtctgctggtcggcaagctgggtcgcgacgtgcccgtctttgtgcacgaacagcaatatctgcgttcgggcctgacctgcctggctggcctgctgttgttgtggaaggtgaccaacgcggatagcgtcttcgctccgcgcacgggcaaatttacgttggccgacctgctgggttcggatgccgtagccagcggcgggttgcccggggggcgcgcgggcggcgaagaggagggctacgggggacggcacgggcgggtacgtaactttgagtttctggtgcagtactacatcgggccgtggtacgcgcgcgaccccgcggtcacgctgtcgcagctctttcccggcctggctctgttggccgtgaccgaaagcgtgcgcagcggctgggatccctcacgtcgcgaggacagcgccggaggtggcgacggcggcggcgccgtgctcatgcagctcagcaagagcaaccccgtggccgactacatgttcgcgcagagctccaaacagtacggcgatttacgtcgcttggaggtacacgacgctctgctctttcactacgaacacgggctagggcggctgttgtcagtgaccctgccgcgtcatcgtgtgtccactctgggctcgtccctctttaacgtcaacgatatttacgaactgttgtactttttagtgttgggttttcttccgagcgtggcggtgttgtaatttccaccacgtgtcgctcgctgcataaagggcgagcgtccccggagagggtatattcgtttggcgagagcgggcagcggtggtgggtatgtccccttctgcggagaagactacctcagtcaccgattccatcatgctcgctatcgtgaatttcaaatacatgggcccgttcgaaggctactctatgtcggccgatcgcgccgcctcggatctactcatcggcatgttcggctccgttagcctggtcaacctgctgactatcatcggttgcctctgggtgttgcgtgttacgcggccgcccgtgtccgtgatgatttttacttggaatctggtacttagtcagtttttttccatcgtggccaccatgttgtccaagggtatcatgctgcgtggcgctctaaatctcagcctctgtcgcttagtgctctttgttgacgacgtgggcctatattcgacggcgttgtttttcctctttctgatactggatcgtctgtcggccatctcttacggccgtgatctctggcatcatgagacgcgcgaaaacgccggcgtggcgctctacgcggtcgcctttgcctgggttctttccatcgtagccgctgtgcccaccgccgctacgggttcactggactaccgttggctaggctgtcagatccctatacagtatgccgcggtggacctcaccatcaagatgtggtttttgctgggggcgcccatgatcgccgtactggctaacgtggtagagttggcctacagcgatcggcgtgaccacgtctggtcctacgtgggtcgtgtctgcaccttctacgtgacgtgtctcatgctttttgtgccttactactgcttcagagtcctacgcggtgtactgcagcccgctagcgcggccggcaccggtttcggcattatggattacgtggaattggctacgcgtacccttctcaccatgcgtcttggcattctgccgctctttatcattgcgttcttctcccgcgagcccaccaaggatctggatgactcctttgattatctggtcgagagatgtcagcaaagctgccacggtcatttcgtacgtcggttggtgcaggcgttgaagcgggctatgtatagcgtggagctggccgcgtgttacttttctacgtccgtccgagacgtcgccgaggcggtgaaaaagtcctccagccgttgttacgccgacgcgacgtcggcgaccgttgtggtaacgacggccacgtctgagaaagccacgttggtggagcacgcggaaggtatggcttccgaaatgtgtcctgggactacgatcgacgtttcggccgagagttcctccgtcctctgcaccgacggcgaaaacaccgtcgcgtcggacgcgacggtgacggcattatgagcggcggcgctgtacgccagcggggagaaaagtggcagataaatcacgtcaggttcacacgtcgttagccagcgtcggcatatgaagggcgcgggcggccagtacggcctctgggctgagacaggacgaggcagggtgagaaagaggaggatgggggggaccggggtggtggtgctgctgctgttgtgggtgtggacggtgcggatgccgggacagcgtgccggcgaacgttctgtaatcttccataataaaggtaaaaatgcccgtctcgtgtcgactccgctggatctcgaaggcgtcgggggtaatgcgcatcttgccggtgccgatgagataaaagtaccacattttttgacagatgatgcgaatcaagggttcgtacgcttcggcaccccagtggcgcgtgaagaaggccgccagacgaaacaagcggtgtccgtagagcgtgcctagggagaagaggatgttgccgttgcgcgccaggtcttcggggaaaacgaccggcaggccggtgtggcgctgcacaaagcgcgtcagcagtccgccgctcaagcgcgggtgacacaggcgctggctgagacgggcggcgcgcgtttcatcgaacacggccgcctcaaagtccagccccgggaaggcctgacgcagttcgcggtacagatgaggccagtagggttgcggcgtcttgcgactaagcacggcgtggtccgagacgcccaggttgttcatggtttcgcgcagtagcagcgtttcgagaccgcggtgaaagaggaggacgcagatgaggcgtacgattttgagttcttccaaacgcagcgagctcagcggctgtccgcgcgacatcttctcgctaatctgtaatattagatgattggcgcaagtaaaggagaatttgcccgtgcggacccgcgggacggcggggttctcttcgtcgcgggccatcatcgttcgctcggtgagcgggtagcgacggtgacgacaatgacgatggacgagcagcagtcgcaggctgtggcgccggtctacgtgggcggctttctcgcccgctacgaccagtctccggacgaggccgaattgctgttgccgcgggacgtagtggagcactggttgcacgcgcagggccagggacagccttcgttgtcggtcgcgctcccgctcaatatcaaccacgacgacacggccgttgtaggacacgttgcggcgatgcagagcgtccgcgacggtcttttttgcctgggctgcgtcacttcgcccaggtttctggagattgtacgccgcgcttcggaaaagtccgagctggtttcgcgcgggcccgtcagtccgctgcagccggacaaggtggtggagtttctcagcggcagttacgccggcctctcgctctccagccggcgctgcgacgacgtggaggccgcgacgtcgctttcgggctcggaaaccacgccgttcaaacacgtggctttgtgcagcgtgggtcggcgtcgcggtacgttggccgtgtacgggcgcgatcccgagtgggtcactcagcggtttccagacctcacggcggccgaccgcgacgggctacgtgcacagtggcagcgctgcggcagcactgctgtcgacgcgtcgggcgatccctttcgctcagacagctacggcctgttgggcaacagcgtggacgcgctctacatccgtgagcgactgcccaagctgcgctacgacaagcaactagtcggcgtgacggagcgcgagtcgtacgtcaaggcgagcgtttcgcctgaggcggcgtgcgatattaaagcggcgcccgccgagcgttcgggcgacagccgcagtcgggccgccacgccggcggctggggcgcgcgttccctcttcatccccgtcacctccagtcgaaccgccatctcctgttcagtcgcctgcgcttccagtgtcgccgtccgttctccccgcggaatcaccgccgtcgctttctccctcggagtcggcagaggcggcgtccatgtcgcaccctctgagtgctgcggttaccgccgctacggctcctccaggtgctaccgtggcaggtgcgtcgccggctgtgccgtctctagcgtggcctcacgacggagtttatttacccaaagacgcttttttctcgctacttggggccagtcgctcggcagcgcccgtcatgtatcccggcgccgtagcggcccctccttctgcttcgccagcaccgctgcctttgccgtcttatcccgcgtcctacggcgcccccgtcgtgggttacgaccagttggcggcacgtcactttgcggactacgtggatccccattatcccgggtggggtcggcgttacgagcccacgccgcctttgcattcgtcttatcccgtgccgccgccaccatcaccggcctattaccgtcggcgcgactctccgggcggtatggatgaaccaccgtccggatgggagcgttacgacggtggtcaccgtggtcagtcgcagaagcagcaccgtcacgggggcagcggcggacacaacaaacgccgtaaggaagccgcggcggcgtcgtcgtcgtcctcggacgaagacttgagtttccccggcgaggccgagcacggccgggcgcgaaagcgtctaaaaagtcacgtcaatagcgacggtggaagtggcgggcacgcgggttccaatcagcagcagcaacaacgttacgatgaactgcgggatgccattcacgagctgaaacgcgatctgtttgccgcgcggcagagttctacgttactttcggcggctctccccgctgcggcctcttcctccccaactactactaccgtgtgtactcccaccggcgagctgacgagcggcggaggagaaacaccgacggcacttctatccggaggtgccaaggtagctgagcgcgctcaggccggcgtggtgaacgccagttgccgcctcgctaccgcgtcgggttctgaggcggcaacggccgggccctcgatggcaggttcttcttcctgcccggctagtgtcgtgttagccgccgctgctgctcaagccgccgcagcttcccagagcccgcccaaagacatggtagatctgaatcggcggatttttgtggctgcgctcaataagctcgagtaagagagacgctatatttagggtttccctctcttttttttttctacaccgtgataccctaataaagcacactgcggttattatcaacgtctctgtgtttttattatttagaaataaatacagggaatgggaaaaacacgcgggggaaaaacaaagaagtctctctctagatgcggggtcgactgcgtggggtgctggaagtggaagcggtgctgatgggtgagggtcgtggcgcgggcacggaccgcaacgtgctgctgatgtctgccgcggtacgcacgtcgccgtccatgtcgctgcgcagataagaggtaggtcgtaatgcggcgtgctgcacgctcaccgttaatggtaccaagtcgtcaaggctcgcaaagacgtgccacgaggggatgacgagcgtgagagccccgttgttaccgcttcgacgtctttgtccggtcaggatcagtgcccgggacagtccggcttgggtgtccgagtcctcgtcgccgctggcctcctcgaagccggcaaacatggcttcggacaggggggtcggcgtcggtgtggaggagaggtcatcttcgtcgtcctcttcctcttcttcctcctcttcctcggtgggtggtaatccgggggactgcgggagaaactcggagacggcgccgcgcacgacgtcgctccgtggaaagagaccggcgcgcagctgcacctggggacgcttgattttgtccggtttaccgggtgtgagagtccaaaacccacggcggaaaaagtggatgcggcctagcggctgtcggtgttccaaatgaacggcctggtcgccggtcagcgtgacgcggagggtgattcgcacacgatcgggtagcgggccggcttctatggagacgcccgggatgttttccgggaaaaagatggtgtcgtgagtctgattggtttcgaaagcattctggatctgcacgatgtactcgggatgtatgcgcgtcagcgtaaaacttttgggaatcaacagctggaagccgttgtccggcaagcgtcgtaggtgcgggtacggattgtgtcgcgccaccacctcggcgcgatgcgtgtaaaccgaaaagtgcagaaacacgctggtcggcgggtgcggtgagtcgtgatgcagaaacagcatgatccattggcctcgttcgtccgtctccgttttgtggatgtacgtgttagggtccgaacaggccagctgctccagggcgtctaccagcgtcagcgggatggcgccggcgcgaaaggcgaactggctgacaaagatctgccctgcctccaaactgctgtcggttctgcggcgccagttcggcgtcacggtcagtcgcacggcccagtggtgagccgtgcggcggatgatggcgcgcgcctccattcgcggccgattttcttcgccgccgcgccgctggctctgaaagaggtgcagtccgctaacgggcacgcggtctagcggcagcgcaaaggccagcaccgagaccgtgttgttttctgagcctggcgtcaggcgtcgtgggccaaagttgttgaggtccaccagcagtcggtcccgttcgcccaccacgcagcggcccttgatgtttaggtcggtcaggtctacggtgtcgtgcggagatttgttctcctgaaaacagcagagaaccgagggtcggctcacctctatgttggtacgcaggtccaggagtcgcagacgaccggcttccagcgagccgccttccacgttggtgatgagccgaagcacctggcagtgcaggcgaccaaagctgccgctggcggcttcggcctcgctgatcgcggccgcttccgacgagggtccctcaccgggcgaggacgatgcctgagacattgcgaaggcgggatggggggagggtcaggggatgcgcaaaggtgaacgggtcttcgtgggaggtcgggaagggttccggcaactgtcgcaaatatagcagcggcgacaggtgtggcgcccaaaagtcgcgtgtctgagtggacgtgggtttttatagagtcgtcttaagcgcgtgcgcggcgggtggctcaacctcgatgctttttgggcgtcgaggcgatgcatggcccgggcagggcttcttgccggtggcggcgacgtttgggttgcgcagcgggctgccatacgccttccaattcggcgaagatgcggtagatgtcgttggcgtcccagaagaactcctggtacttcagattctgaccctgaaccgtagccaccatgggcaccaggttgcgggccaggatgccggcctgccagggcggccaggtgaacacggccggattgtggatttcgttgtcggaatcctcgtcggtgtcctcttcgggcgcgacggtggactcggccttaaggcggccgcgtgtcataacgcccgccgtgcacgccgtcgccgaggatgctgatttgcgtttgcggcccgcggaagtggaggcgcccgccatggcgccgccgccggtaacgcggggcgtcttgcgctcggtggttacgagttcttcgtcggagtccgatccgctggtccagacgtcgtcgtcgccctgggcggcaccctcgtcgtgccggtcccaggtgtgtcggtactcaagcttgccctggatgcgatactggctggtgaaggtggggtgctcgctgtactgaggcccgcgctgcagcagcaagtcgatatcgaaaaagaagagcgcagccacgggatcgtactgacgcagttccacggtctcgcgtatcgcttgtacctccaggaagatctgctgcccgttcatcaacaggttacctgagatgctcaggcccgggatgctcttgggacacagcagcccaaaatgctcgtgtgaggtaaaagccacatccagcatgatgtgcgagatcttgcccggtttgattatcatatttttgggacacaacaccgtaaagccgttgcgctcgtgggggcgcatgaagggttgcgggttgcgggtcatcgtcaggtcctcttccacgtcagagcccagcgtgacgtgcataaagagcttgccggagggcacgtcctcgcagaaggactccaggtacaccttgacgtactggtcacctatcacctgcatcttggttgcgcgcgtgttctccatggagcaaaccagctcgtgcgcgcacaccacgtgccgcagtgccacgtccttggtgggaaacacgaacgctgacgtgtagtagacgtcgggctctttccactggttctgctgacgcgtccaggccagtcccgagaccgtgagacgcgcctgccacatctgcttgcccgacgcgtgaatcacagcgtcagctacgggcaggtgtcggtgtttgcgctcggccgccgacgggtagtggtgcacgttgatgctggggatgttcagcatcttgagcggcagcgcgtacacatagatcgacatgggctcctggctggggcagatgcttcggcccgtggggttgtgcacgttgaccgacacgttctccacctcgctgcccgtaaagtacgtgtgctgcacctgcagctgattgtcgccgcggtggcatggcgtcgagtcgggcgtgtactgcgacaccaggatcagcgagggctggctcacgcgtacgtggatacccgtctgcaggagtcgcgtctcgtgcggcagcaccggcgtgtcgccgcgactaaacacggctttcagcacgtgccccgaaatgggacccagtacggatatcatttcgggacaacggcgaccgcgcgactccatgctgcctgcgcgtacgggtgtaggcgactgagcggcgcgccctttgcggccgccgccttacataggcaggcgaccaaacgcggaacccgaaataaaaacgttctacacagagacaaccgcggattattgagtgtctttttttattacaaaaaaaaagaggcaaagccccaccgtcaccacaccccatcacacaccaccaccgattttttttgttttaaccccgtatcgcgcggacgcctagtgtccgtttcccatcaccagggtcctctgtttagagatcgccgcagaccatggctaaagtgacaggactcgttttctctgtcgtattttccgtgagcttacagtcttgcggttccgtctccggggacgccagtcgcatgggcagcaggtcctccagcgcgatggaagcgcccagcaccgagagctgctgttgcgacggcgaatgggacgtggaccgcgagtgtagcgtggatttgacttggtgcgtcattgctgacaggcaaccgcgattcagcgtatgctttgacgagataaaatagaggcgtcccaggagcgcgtcccgtgggaacgtggcgccgttctcgtcgctcaccagtacggttaattccaaccaggagcgcggtagccagaccgtaacgggcattttgagtccctgacggttgtgtggtacaaaaacacccagataaggcccgtaaaagcggcggtagatacgtaacgtgtgcgagtttttcagcgtcaattcgtaagggacgcgcacctccagtccctcgtccgccgcaccggagcgtggcggtacaaagtaaggcagtggcgcgtccgaaaagaagggtcgtcgcaccgtttcgcgtcgcagccgcaggcgaaacgccactgggtcggctggcgcctcggtgcggtcgcaggtcacgttgaaacgtaacatgccgtcttggtatagcgtgagtgacgacagcgtcaggtccggcggtgattcgttcgggtctagctccaatcgtccaaagacggagggtcccaatgtcttggcagtggtttccgagaggcgcgccgagatacggctggtgagtccacgcggccccgagatgccgccttccactcgatgccagcacagcgcgtgtcgtacgcgcaccgtcagcgtgggcgtcagatccgcgtccgttgattccgcggtatcagcgacggaagccgcgttctccgttacgttgtttatatccagcgtcggctcgaacgtgagttctggcagatgcagcgcaagacagtcgtgtaacgccgtgtgatgcgcggctttacgtcgtagcggtagccgtttcagcagcggcgtgatgatacggagcgcgaagagattgagtgataagcgcacgatggccatgcgcgtcagttgctggtcgattactgagcgcaggatatggcagcctgggcgtgcgggaaagagagagaaggccgggcgtacgtcagaatcctcgttagataccacgcatagaatgccgcgttcacgatcgtcgttgcggtcatcctcgtcctcttcttttttcttctctttttccttttttttctcgggctcatgggaagccgccgtttcttcttcttgcgacgtcgcggagtcggtttgagactcgccgttcgcttcccccaattgcagcggcgtagagagcagaatctggaagggatcccgcaattcttcgggtcggaggtcgaggtgcaactggatcagatggtaggtgccgcggtgcacccgaggctgacggatgtcgtgtttatccgtcagtgtgaggatggtctgcggcgagccgctgtgcttgtccagctcgtccggcgttttcaggaggaggctgtcgtcgtcggtactggcgacgcccatcatggtcgtggtggtagtggtggcgaggaaagtgagcggcggcgctgacagagctcggcgttggcggcggcatttgccgctgtgtcggctgctattgctgccaacgccaccgccgccgcctcgtctggctcgtggccggcgggcccgattccgaaggttggggtcgacgcgtggcatgcttggtgtctgcgggcgcgagagggctggctcagcctttaaatatgcaggtcgcggatttgttatcgggtgaaacgtcacacaccgtgaagacgacctgttcgcggatgaggtcatccagctgtcgcagcatgacgaaaagcgccgacagccgcgcgatctcgtcgtcgggcgacacgtgctgcggccgcgcgggcgtgcgcggctcgccgacgctgcgctcgcggtccagccgcatcagcagctcctggcacttgacgagcagcatggagctgtcctctagcgccaacttgcgcacgtaggtcatggtcagctccgaggctaggttggccaccatggacatggagaggcaggcggtcttcatgtcgatcagcaggtgctggtcgatgaccggatcggggatggtgaaggtggcgtcgcgaaaagtaatggtctgcagctgctgcacggcagcctttacctcctcgtacgaacggtcgagcgagaagaggcccatgatgagtagtcgctggttgatttccagcgccagtggcatgggtacgatccagggcagcaccagctcccactggcccagcgtcagcaggttctcgcgcgccagcggtccgtggaagagcggcggcagcacgcatagcgcgtcgcccttctcccaagtcacgggtcccgtgttgaggacggtgtagagcagtccgtgcgtcggtacgtgtaggaggatctggttgccttctacgcgccgcatcaacgtcagcgtcatattgcgcagcaggccgcgcagtcgtacgtagccgcgggtgtgatctacgaactggtgtaggcccagctggtagtgtttgatgagatgtagacgctgcggaatgggcacaacggccgctactagcttggtcagtttgcctacgtcggcgatgctgagcttgtggtcgaaagtgcagaagatgttggcctccatggccgccatagcggcggtgaaatcctggccgcgacggaggagaagcagagacgaacaacgtctgcaccgggcgcggcgtcagagcgagcgtggcgcgtccgggcccgcgtttgcgtctaggtgattcgccgttaacctgcggtcgtcgccgtcctcctcaccggacggcctcacgagttaaataacatggattgctgtagcgggatgatttcgcctacgacgtagttaccaaagtgcgtttcggacgtggcaaaagccccggcgccacccttgagtttggtctccatcagcgccagcgtggtggtgctgaggatcggtagcgcttcctgcgtcagacggcacgggttttcgatgagttgttccgtgccttcgacgcagacgtactgcgtgtccgtgtcgccgcggatgcagtccttggcgcgtagcaggtactcgtcgatggttttgaagagcgttttgttggccgcgataatctcttccgtgttaaagtactgcgcgcaggggctgtagaatttggagttgtagcctagacgttcgcgatgtcgggtgttgtagagtacgtcgctcagacagccggcttgcgaggcccaggggttgtgtgtggccgcgaaagtctgtgcgtccgcttcgcgatggtcgtagatggccttggtggcggcctccgtgtcgtacggatcgacggccagcatgcaggaggcacgcccgcgcgggttgttggggatcttaaagtaattaacgtccatcgtcaccggcgtaaggattagttcgcacgcggccttttgtccgtgcaccgtggcggcggcattgcgctcggacatgctgccgaacgtcagcatggagatggtctccgtgtctaacagttgcggccgttctacgccggccgcgtgccggatccagcggtccacctcgtcgtgccggtacacgttcatagggaagacgcgaaagaggtcctgcacgcggacgcccatgtcggttcgcacgcggtttacgtaggctacgcaggtatttgacgtgtaacccagacccatgtctacggtgttaatgttctgcgtgacgtggtacgtggtgctgatgtcgcgttcctccttggtcacgatagggttgttgatgataactgacgtgcacgatttgccgctgtagagcagcatgtccacctcgaaggtgtcggtgcgtacggccgtgagtgcgaatcccgggtggatgtgcgccttggtctgcagcaccagtgaaactggtgagattttgtataacatggcggccagcgtcatgactgagtgcaacacgttgggacaggtggccgagtaacgcgaaaagggcgagcgcagccagttgtggtactcgtgtgcgaaggctgtgggtagcgggaaaccaccgtcgtgacggtgatagtgcgggaactcggtcacgtagcgtttaatgtcgtcgctcaacgccgcgcagatggtggggtttgagtagaaacggtggaaaggtacgggtaggctgtactcgatcaacgtcttaggcgccgtcacgacgcagcagccgttgtaaagcacgtgctgacgtgagataaagtccggcaggccctgacgttgcgcgtggtccagaggcgcgcgcacttcgagcaccttgacgtgctcgcccacgaattgcacggccaaaaacagttcacgacaggcctgcagcagcggcgtgtgcgcgtcggtggcgacgtcctccaccagctcggtcagcatctcgcctacggcttgacgttgcgccgctatcgagtcttcgggggtgacgccgcttgtgctctctttcgacgtcgtacctgacgtggagaccgcggtggcggccggcatcaggagaaacgccggtcggtaaaagaggtctactagcagcgtcttgaggttgagtcccaggccgcaggcccggttgttggtcatggcgggcatgaggcagagataaaagaccttttgtaacgtccattcgtcgtcggtggcacggtaatcgtccacaaacagcggctcgtcggcatccatggcgcccaaacgcggtacgtcagaaacgccgtggtgtcgcgcctcgatgttggccgggttcaacggttgccggtcggccactacctgtacgccttccatgttacgcggcaggtgcgtaacgaaggggggccacagccggtggtcgtgcagcgcgttcacgtaagccgatagcggttcctcagccagttgaccgttgttaagtcccggcagcgctgagatgcgcgttaccagacgcagcacggcgaccagattgcggtagtgaaagagcaactgcggtggtagggcgccatcagccaggtgttcggcgatcaacgtcaccagcgcgtagctgtgcgcaaaaaccagcagctgacgtgtgtgaaacatgttgacgatacaacgtgctacgaaagtgcggattagcaaaaaagcgtcgacgttgccgtgtaccagcacgtcgaccaggtagcagagctcggggtaattggggcttgtcacggtggttttgaaaagtcgcaacgtctcttcgtagtcgggtggtggccgcagtcgcatgtgttccatgatctcccaggtgcgcagttcgtggaaggggcccggtgccagtccatctggcaaattaccgatgacgatacgcggtgtacacagcgccaccgtttcgctgttttcctggcagtgcgtaaagtcgaagaaggggtgcagctcggtgtagagcgtgatgttgcccaccttgtagaagtcggtgaccacaaagtcctgcttcatttcgttcaccgtgcgcgggacctcgcgtcgtacgcggtaaaaatgcggtatgcggcgcgccgcaccgcccatgggttcctgctgaaaacgacactcgagcagtcgttgcatggcgggttccgagggcggtccgcgttccgtgaaggtctgtagacagggcgcgggctcgtgcagcaccgggtggcacagcgtcttgagcgcgtccacaaagtctatcttttgtacggcacggtcccggtttagcaggtaggccgtggtgggcaacgcgttgcgaacggtgtcgttaagcttaactttgctttccaccgtggtgtaaccgcgatcctcgggcagatacagccctacggggaagaaaaacgtcaggtccacgttacgttctagcggatctttggtatcggtgtttttgtagacgcgccgcaagttttccataatcaccgttttttcgcccagtcggatcacgtccatgctcagcggcgttaagctgtgcgccccggcctgcgaaagcgagtcgttgggcaaatgcggttggcccgaagtcagatgagccttgtacgagttgaaatcggccaggatcgagtgataggatatggcagtgacggcattttcgggactgagtacaaaattgccgtaggtggccggcgccgagaccgtttctttggtgatgtggcttgagagcagcgacatgatgatctgcataacgttggccgtgcttaccatcacgccgctgatcttggcccccgagctcgtggtgtacgtcgtggggttgtctaggatgctatcggtggccgcttcggctagacgcgtgaggaacttgagcacatagtcgcgatcgcgcgtgcgattcagcaaaaagagcgtggccagcattttggccttgaagctctgcaagatgttgcttcgctggatgcggttcagcgcctgtcgcgccagcgtggcgttctctaccagcgtctgcactacaaagtacggcggcgccttgcgtagcagtgtctgtaaaaagctgtgaatcaagccgcgttccatggcgtcggccgtgtttttgagcgcgcgcagcaccgtgtgcatagcttccacgttgaggatcttgtccaggatggtgccttcgaacgtctcgcgcagatacgtgaggcaggctgcgctgagctcaaaggggatggtgatgggggatttttcactgtatttggtgaccataatggtggtctgacgactggtgggcaaaccggcgccgctggccacacgcggcacctgcacgtggaacagcatttttcccgtagtcagtttattgaggtcgtggaacttgatggcgtgcgccgccgcggccaagccgctggtcaaaaaataaacccattccaggcgattgcagaaggtgccgaagatggcttcgaagtgaatattgtaacgctcggggtcgtcgccgtagtagatgcgtaaggcctcgaacatctcctcgccggcgctggtcttgacgtgcgtcagaaagtcagtgggaatgcctactttaggcaggagctcgagcgccgaccagttctccatcgcggcggcggcgtgagcgcgaggcgtcggagctcggggaaagcagcgcgacccggagaatggccggcgctgcgccgcgccgcctcggctgtgacgctctaatagtcgtcggcggctccgctacgccgcgccgggttttacacgtccccgtgcacgttcgcgcctgcaacctcacccaagagctatcgacgggcgaggacgcccgcttctgtcgtccgcgacccgttaacgtcgaacgggtgcgcgctgtttttgcggctctctaccgtgcctgtccgatacacgtgaggaccgagcccgagcgtgtcaagctggtactgggtcgtctgttactgggacccgtggccgtaccctgtttttgcgacggtgaagtggagggccacggtgaacatctggtacctacgacgcagttttgtcgcgggccgctgctctacgtgcaccgacgttgttgttgcggatccgtgaccgccgggcgcgcgctgtcctaccacgttctcgaaaaccacgtggccacgcatgtgctacgcggattgctctcgctgacggaatggaatcgagaattgccgagcctcttttgcgactgtcctggcggcggtggcgcctcgggaaccgaggaacgctacgccatggcctgcctgccgcgcgacctcagcctgcacctggacgactatccttacctgatggtggaaatcggacgcgtactcagtgtcagcgaggtagacgactacgtaaccgccgtctccggctacctgggcgaggccgcggcgccgcgcattcaggttcactacaagctgctctttggactcaacgtgcgtccgcaagcgccgtgcgcgttggacgctacacgcgacttttttctgctggagctgcaaaagctttggctgggcgttgaatatcaccacgaagtgacgtcggagtttttcggtcgcgtgctggcccagctgcatcgcgaccgcgcccgcgtcatgatggcgcttcgcttgcccgagcagacggtgtgccacctgagcaccttcgttctcagtcgcttcaagcgacaggtactgtacttcaagttacaggtgagctacggcaagtgccggactggccacgctgacagaagtgggggaggggggaacggtggaaatcagggacaccacaacctactgtgttatcgacgccttagcgtcacatttgccgacacagacacggtgtggagaaaccttttctacgtttattacgaactagctcgggatctggggtcccatgggacagagaaccgacccgtaaaccgcggttacggtgtttcttgcgctccgaggacgtcgcggctatcaccgtcagaatcgacggtggtttcggcgaacggacacgcgctgtcttccaccgcgctcccgacgacgagcgcgggtcacaagctgtcactgccgcgcgacccggccgccgatcgcgttcgacgttacgtgtgcattatctcgcgtctcatgtacgctcggtacggggagagatggcgtaaacaccgtcaacggcggtcggagacgggagaagaggaggaggaagagacgctggaatcgggggagactgacgccacgccgccatttgactttacggggcagcagctgcgccgggcctatcaggaacaccgacgtcgtaaacatctagccgtgcagcgttacgcgccgtgccgtcgtaagctcatcggcgggatggagtttgccgaggtgacgggcgtgagtctggaccgcatcgccgtcaacgctttcaacaccaaccgcgttatcaatatgaaggccgcgctctcgtccatcgccgcgtcgggtctcggcgtgcgcgcgccgcggcttcccaagaacatgacccacagttttgtgatgtacaagcacacctttaaggagcccgcttgcaccgtcagcacctttgtttccaacgacgccgtctacatcaactcgctcaacgtcaatattcgcggttcctaccccgagtttctgtactcgctgggcgtgtaccggctgcacgttaatatcgatcacttttttctgccggccgtggtgtgcaatagcaactcctcgctggacgtgcatggactggaggaccaggcggtgatccgctcggagcgcagcaaggtgtactggaccaccaactttccgtgcatgatctcgcatactaacaacgtcaacgtgggctggttcaaagcggctacggccattgtgccgcgcgtctcgggcgctgacctggaagccattctgctcaaagaactctcgtgcatcaagaacatgcgcgacgtgtgcatcgattacggtctgcaccgcgttttcacgcaactagagctgcgcaattcgtaccagatccccttcctggccaagcagttagtgctgtttctgcgtgcttgcctgctcaagctgcacggtcgagagaagcggctgcagttggaccgcctagtatttgaggcggcacagcggggtctctttgactacagcaagaacctcacggcgcacaccaagatcaagcacacttgtgcgctcatcggcagtcgtctagccaacaacgtgcccaagatcctggcccggaacaaaaaagtcaaattggatcacctgggccggaacgccaacgtgctgacggtgtgtcggcacgtggaagcccacaagatccctcgcacgcgcctcaaagtgttagtcgaggtgctgggcgcgttgcagagtatcagcggtacgccgcacacgcgcgaagtgatccaccagacgttgtttcgattgtgctcggcggccgcagccacatcgggcctgtgttcatcccctcccccattgtgtgtgtcctcatcttcctccgtcccctctgtcccaacctccgtcagcgttgacggcagttctgaacccacgtcgccgcgagcgcggtttgcatcacgatgatggaagccgcggccgctgccgccgcggcgtttcgtccggaggagcgtccgacgccgggttggcacgacgcggcgttgttaatggacgacggtacggtgcgcgagcacgcgtttcgcaacggaccgctgtcgcaactgattcgccgtgtgttaccgccgccgcccgacgccgaagacgacgtggtttttgcatccgagctgtgtttttattgcagcggtcgttttaaccgcaggtcgtccgtcttctccatctattggcagaagcatagcgatctggtgtacgcgcttacgggcattacccattgcgccaagttggtggtggaatgcggtcagttggggagtagtaggctacggtggcgcgacggtgatgcgagtggtgaggagcgccggggagacgacgacagcagggacgagctgtacgacgtgccgggcatttatatgattcgcgtcaacgacggcggcagcaccggtcccagacacgttatttggccgggtaccagcgtgctttgggcgccggacgttgtgatcactacggtgcagcgacgaatctcggcggcgcgcgccctggtgaacacgttccgccaatatttttttttgctggaacggcgctcgcacgaggagctggttctttgtccgcccgagatggaggagcgtctagcgccgttgttgcagagtgccacgcgcggtgattcggacatgtttgacggtgtggtggccagcgcttatcaccgtttgcgaatgagtaatattccgcgttcatccgcccgtctgctggagcactgcgtggggctggcgggtgctaagaagctgctcttgctcgacgtgccgcgtctggagaactattttctttgtcaggtctgtctttacgagctggacgaggacgagatgggcgaggagatgctgggcatgttggccggaaagcccgaggatgccgccgtctcgggcgcaagcggcggttttctgctacatcgcaagacgatgaagctggccgcctgtctgtgtttgttgctcaattcgctgcatttgcaccaggaggcgctggaggccttggatcctccgccgccgcgcgtcgaggagaacgaccttgtcaacgtggtgctgcgccgttattatcgcagtcacggcggcgtgcaggcgcggacgctggcggcggcccgggctttgttagccgactacgctgaaacgttttcgcctttggggagttttacgcgcctgggttacgatcgtctcgtttctgccgatgccggcgtcagtcgccggcacctggtggctctgctgcgtgcctagctgaccctgaaacggatggcgtgtatatcgtcacacaggtaggtggccatgatgacggcgatgataagatcgtccgagatacgattctggcgcttggccgagtagcgtgccgtcgtgccttcggccagcgtgacgcggtgcaggttctgaatctgctccagaagatactcgatggggtcgtggctcagcttgatggtgtaggagacgagctcttgcgaggctttgatgtagcccgagttgaaacgcgagatgaactgttccacggccagcgccttgtcgcggcccatgaggtagaagggctgttcgatgtggttctggtcgggcgtgtggtagaagagcacgcggatgagcgtgctgctctgcacgctctgtcggatgaggcaggcgatgcgcacggccgccgcctggttggtgttgccctccacggcgatacgcagttcgtccaggtaagggtgcaggctcagcaccgagatgatcatgtgcgccgcgcactcggcgatggctacctcagaactctcggagaggtcgcgcaaaaagaaatgctctaggccgtaaatgagaaactggtgtcggtaggcgcctacggccgccacgcccgtgcccgaggccttgcggttggtggtgaaggccgggtccagatacacgtaaagcgtcttgccgaaataatcgtaggcgttggtgttgagcgtgctgtaacgcaaaatatcgaactcttcgcggctctggtccgtgatgagcacggtgttctgcgagattttattggtaccgccgatgatctcgtccatgaaagcgcccggcataaacatgttggccgtcttgcgcacctgcgagttgaggctgatgaaggtgggcttgtgcagtcggtagcaaggacacgccgtggcgtcgcccttctccgtgaagctgtgcaggtgctcttcgcacacgtaagagaccacgttgagcatgtcaaagggcgcattgttgaggcgcgtcaagaaacacgtggcgtcactggtagtgttggtggacgatatgaagatgatcttggtggtattctgggccaggaaccccagaatggtgttgaaggcctctttcttgatgaagtgcgcctcgtccaccagcagcaagtggaagttttgtcctcggatgctctgtgtagagaggagacagaaaagggactcttataattacgcacgctcggctggaagcctacagagtcggggtggggccggacaggtgagccaggtgagccgccaggtgaggcgggatcaccgtgtgccaaccgggctgcgacctgaaaaccggaaccaatccgccgacaccggcgccgcgtgacgcgcgcccataaaaacgaaagtgtcgtcgtcgcgacccgccacagccgccatgaactcgttgctggcggaactcaaccgactgggggtcgcgcacgccactacggaggatgtttttatctttgtcgaccgcctctttcaacacttttccttccttttccaggccgaggagtcaggcccgcgccgcttggaactggtcgcgtccgtgttcgagcacctgacggtggagtgcgtcaacgacatcctggacgcctgcagccatccggacgtgaacgtcgcggagacaagcaacacctgtcgtccctgcccttctcctgccccctccgcccccaaaactgtcagcgacgctcagacgtcatgtgcgacgcctcgggcgcctgtgacatgaggcacgtccagaacgcgtttaccgaggagatccagttacattcgctctacgcgtgcacgcgctgctttcgcacgcacctgtgtgatctgggcagcggctgcgcgctcgtctccacgctcgagggctccgtctgcgtcaagacgggcctggtatacgaggctctctatccggtggcgcgtagccacctgttggaacccatggaggaggcctcactggacgacgtcaacatcatcagcgccgtgctcagcggcgtgtacagctacctcatgacgcacgcaggccgttacgccgacgtgatccaagaggtggtcgagcgcgaccgcctcaaaaagcaggtggaggacagtatttacttcacctttaataaggttttccgttctatgcataacgtcaaccgtatttcggtgcccgtcatcagccaactttttattcagcttatcatcggtatctactcaaagcagaccaagtacgacgcgtgtgtcatcaaggttagtcgtaagaagcgcgaggacgcgcttctgaaacagatgcgttccgaatatggaaacgcacctgtattcggatctggcgtttgaagcgcggttcgctgacgatgagcaattgcctctacatctggtgctcgaccaggaggtgctgagtaacgaggaggccgagacgctgcgctacgtctactatcgtaatgtagacagcgctggccgatccgcgggccgcgctccgggcggagatgaggacgacgcaccggcctccgacgacgccgaggacgccgtgggcggcgatcgcgcttttgatcgcgagcggcggacttggcagcgggcctgttttcgtgtattaccgcgcccactggagttgcttgattacctacgtcaaagcggtctcactgtgacgttagagaaagagcagcgcgtgcgcatgttctatgccgtcttcactacgttgggtctgcgctgccccgataatcggctctcaggcgcgcagacgctacacctgagactggtctggcccgacggcagctatcgtgactgggagtttttagcgcgtgacctgttacgagaagaaatggaagcgaataagcgcgaccggcagcaccagttggccacgaccacgaatcaccgtcggcggggcggactgcgtaataacttagacaatgggtcggatcgccgtttgcccgaagcggctgtggcttctctggagacggccgtcagtactccattttttgaaattccgaacggagcaggaacctcctccgcgaacggcggcggcagattcagtaacctggagcagcgggtagcgcgtttgttgcgcggcgacgaggaattcatctatcacgcgggtccattggagccgccttccaagatacgcggtcatgagttggtgcagctgcgcctggacgtaaatccagacctcatgtacgccaccgatccgcacgaccgcgacgaggtcgcgcgtacggacgagtggaagggtgccggtgtctcgcgtctccgcgaggtctgggatgtgcagcatcgcgtgcgcctccgtgtgctgtggtacgtcaattccttttggcgcagtcgcgagctgagctacgatgaccacgaagtcgaactataccgggcgttggacgcttatcgggcgcgcatcgccgtcgagtacgtgctgattcgcgccgtgcgcgacgagatctacgctgtactacgacgggacagcggcgcgttgccacagcgtttcgcctgctacgtgccacggaacatgtcctggcgcgttgtttgggaactttgccgtcatgccttggcgctctggatggatcgggcggacgtgcgtagctgtattattaaggcgctaacgcctcgtctgagccggggtgccgccgctgccgctcagcgagctcgtcgccagcgcgagcgctcggcgcccaaaccgcaggagctgcttttcggaccgcggaacgagagcggtccgcccgccgaacggacttggtacgctgacgtggtgcgctgcgttcgcgcgcaagtggatttgggcgtggaagtgcgcgcggcgcgttgtcctcgcaccgggctttggatcgtccgtgatcgtcgcggacgcttgcgacgttggctctcgcaggccgaggtgtgcgtgctctacgtcacgccagacttggacttttactgggtgctgccgggcggctttgccgtctcttcgcgcgtcactcttcatggcttggcgcagcgggctttgcgagaccgattccagaactttgaagcagttcttgcaagaggaatgcatgtggaagctggtcggcaagagccggaaacaccgcgagtatcgggccgtcgcttgccgttcgacgatctttagtccggaggacgacggctcgtgtatcttgtgccaattgctgttgctctaccgcgacggcgaatggatcctctgtctttgctgcaacggccgttatcaaggccactatggcgtgggccacgtacatcggcgtcgtcgacgcatctgtcatttacctaccttgtaccaactgagcttcggaggtcctttgggtccagccagcattgatttcttgccaagctttagccaggtgaccagcagtatgacgtgcgatggtattacgcccgacgtgatttacgaggtctgcatgttggtgccccaggatgaagccaagcgcatcctggtcaagggtcacggtgccatggacctgacctgtcagaaggcagtgacgctaggcggcgccggcgcctggttgctgccgcgtcccgaaggctacacgcttttcttttacattctgtgctacgacctgtttacctcatgcggcaatcggtgcgatatcccttccatgacgcggctcatggcggcggccacggcctgcgggcaggcgggttgcagcttttgcacggatcacgagggacatgtagatcccactggcaattacgtgggttgcacccccgatatgggccgctgtctttgttacgtgccctgtgggcccatgacgcagtcgctcatccacaacgatgaacccgcgacttttttctgtgagagcgatgacgccaagtacctatgcgccgtaggttctaagaccgcggcgcaggtcacactgggagacggcctggattatcacatcggtgtcaaggattctgagggccgatggctgcccgtcaagaccgatgtgtgggacctggtcaaggtagaggaacctgtgtcacgtatgatagtgtgttcctgtccggtgcttaagaacctagtgcactaacggggtctgacagttcacggggagaagaaacaagaaataacaaaaaaaaaaagaggacatggactcgccacggtttgtggcaaggcgtatgttatcatcatggagctactcacgttggtgttgtagcaactggcaaaaagcgccgtgctcttggcgccgcggtggtcgatgctgatcacgttgtccttgttctcgaccacgtagtcgcgcgcgaaggtgtggcggcagcggaactcgacctctttgagcacaaactgcgacacgtgcttttggtgcgccacgtagccgatgctgatgccgatcatgtgcttaagcagaaacgagataatggggatgatgaaccaagtcttgccgtgacgtcgcggcaccaggaacacggtggctttctgcttaaagatgtcgatggaggtctgcgagaggaagtcgatctggaaggcgtggatgaggtactgcagcacgcgattggccagcacggggatcttggtcacggctataaaaaagatgacgtgtatcaataaattcttttgaaacggttcgagtcggatggcttttgcgtcgccctcgacggcggtactgaagccgccgtcgagccactttttaaagtcggtcatgaagttgttgatctgctgaaactgcggatcgcggtagagctcggtcaacgcgtccagcttctggtaggaggcgcgctgctcctcggagcacgggcgaaacgtcagttcatcgagcgcgctcttgaggcgctcgtgaaacagcagctcgcgctggctttcctcgggcgagttgtagtcgcggtggcggccgcagaaggccatgagcggcaggaaggcctcgttgcacgagtgggccagcccgagttcggggtgcatcatctggtagcgcttgcggcacagcgccgccacattggtgaaggccgtggagatgcaggaggtggggtggctcttgcgcttctgcagctccgcgtagcgctcctggatcttggcggccgaatctccgcgcaacatgatggcggcggcggtggtgcgagcggaggttaggcggcagcggcgagaggagaggaaaaagatggcgtccgcgaggacgacggaggatccacccgaaaaccacgttgtcgcggacgtggcttgtgggacgggcgccgtcactcgttcgtcttcgtcgtccttagtggtgtcgtcctcctcggcgtcaggctcagacgaatcttcatccgcctctcctctcagtttccccgtctcctccccctcaactgccgtcaggtctccggggtccgccggggtttcaacgtccctgtgctcggtggaacggatggtcgagctgtcggcgcagtctccggccgccgatttctcggtctccgaggcttggcgcttcgaggaggccgtaaatatggcgctggtggcctgcgaggccgtgtcaccttacgatcgctttcgcctaattgaaacgcccgacgagaatttcttgttggtcactaacgtaattccgcgcgagtcggccgaggtgccggtgttggatagcagtagcagcggtggcgatagcgggccggaggacaaaaagaaaaacgtcgggaataaaaccgcgggggaaaagaacggcggtgggtctcgggccaaacgccgtcgtagacgacgcgctccgaaaaacgacgccgccacgccgtcttttctacgtcgacacgacgtgctggagcgtttcgcggccgcggctgagcctttgccgtcgctttgtgtgcgtgattatgtgttacgcaatgctgaccgtgttacctacgacggcgaattaatctacggcagttacctgttgtatcgcaaggctcacgtggagctgtcactctccagcaacaaggtgcaacacgtggaagccgtgctgcgacaggtgtacacgccgggcttgttagatcatcacaacgtgtgcgacgtggaggccctgctgtggctgctgtactgtggaccgcgaagcttttgcgcgcgtgacacctgtttcggtcgcgaaaagaacggctgtcctttccccgcgttgttgcccaaactcttttacgaacccgtgcgggactatatgacctacatgaatctggctgagctgtacgtctttgtttggtatcgcggctacgaattccctgcgccgacgccgcaggcgacgacggcgggtggtggtggtagtggtggcggcggcggggccggcgcttgtgcggtcgagacgagcgcgtcagcaggccgggtcgatgacgccggcgacgaggtgcatttgcctttaaagcccgtctcgctggaccgtctcagagaggtattgcaggcggtgcgcggccgcttctcggggcgcgaggtgcccgcctggccggcctcgtcgcgcacctgtttgttgtgcgcgctctacagtcagaaccgtctctgtttagatctcgcgcgtgacgaggcgcggaccgtgagttatagccccatcgttatccaagactgcgccgcggctgtcaccgacgtcactttgagccacatcttgcccggccagagcaccgtctcgcttttccccgtctaccacgtcggcaagttgctggacgctctctcgctgaacgacgcgggtctcatcacgttgaatctatgacgtcggtcaacaaacagctcttaaaggacgtgatgcgcgtcgaccttgagcgacagcagcatcagtttctgcggcgtacctacggaccgcagcaccggctcaccacgcagcaggctttgacggtgatgcgtgtggccgctcgggaacagacccgatacagtcagcgaacgacgcagtgcgtggccgcacacctgttggagcaacgggcggccgtgcagcaagagttgcaacgcgcccgacagctgcaatccggtaacgtggacgacgcgctggactctttaaccgagctgaaggacacggtagacgacgtgagagccaccttggtggactcggtttcggcgacgtgcgatttggacctggaggtcgacgacgccgtctaacaggtatagcaatccccgtcacgcctctgttcatattttattaaaaaaaaacacaacataacgacagtgtcggtgtggtagctagtgcagccctaggaacagggaagactgtcgccactatgtcctccgcacttcggtctcgggctcgctcggcctcgctcggaacgacgactcagggctgggatccgccgccattgcgtcgtcccagcagggcgcgtcggcgccagtggatgcgcgaagctgcgcaggccgccgctcaagccgcggtgcaggccgcgcaggccgccgccgctcaggttgcccaggctcacgtcgatgaagacgaggtcgtagatctcatggccgacgaggctggcggcggcgtcaccactttgaccaccctgagttccgtcagcacaaccaccgtgcttggacacgcgactttttccgcatgcgttcgaagtgacgtgatgcgtgacggagaaaaagaggacgcggcttcggacaaggagaacctgcgtcggcccgtggtgccgtccacgtcgtctcgcggcagcgccgccagcggcgacggttaccacggcttgcgctgccgcgaaacctcggccatgtggtcgttcgagtacgatcgcgacggcgacgtgaccagcgtacgccgcgctctcttcaccggcggcagcgacccctcggacagcgtgagcggcgtccgcggtggacgcaaacgcccgttgcgtccgccgttggtgtcgctggcccgcaccccgctgtgccgacgtcgtgtgggcggcgtggacgcggtgctcgaagaaaacgacgtggagctgcgcgcggaaagtcaggacagcgccgtggcatcgggcccgggccgcgttccgcagccgctcagcggtagttccggggaggaatccgccacggcggtggaggccgactccacgtcacacgacgacgtgcattgcacctgttccaacgaccagatcatcaccacgtccatccgcggccttacgtgcgacccgcgtatgttcttgcgccttacgcatcccgagctctgcgagctctctatctcctacctgctggtctacgtgcccaaagaggacgatttttgccacaagatctgttatgccgtggacatgagcgacgagagctaccgcctgggccagggctccttcggcgaggtctggccgctcgatcgctatcgcgtggtcaaggtggcgcgtaagcacagcgagacggtgctcacggtctggatgtcgggcctgatccgcacgcgcgccgctggcgagcaacagcagccgccgtcgctggtgggcacgggcgtgcaccgcggtctgctcacggccacgggctgctgtctgctgcacaacgtcacggtacatcgacgtttccacacagacatgtttcatcacgaccagtggaagctggcgtgcatcgacagctaccgacgtgccttttgcacgttggccgacgctattaaatttctcaatcaccagtgtcgtgtatgccactttgacattacacccatgaacgtgctcatcgacgtgaacccgcacaaccccagcgagatcgtgcgcgccgcgctgtgcgattacagcctcagcgagccctatccggattacaacgagcgctgtgtggccgtctttcaggagacgggcacggcgcgccgcatccccaactgctcgcaccgtctgcgcgaatgttaccaccctgctttccgacccatgccgctgcagaagctgctcatctgcgacccgcacgcgcgtttccccgtagccggcctacggcgttattgcatgtcggagctgtcggcgctgggtaacgtgctgggcttttgcctcatgcggctgttggaccggcgcggtctggacgaggtgcgcatgggcacggaggcgttgctctttaagcacgccggcgcggcctgccgcgcgttggagaacggcaagctcacgcactgctccgacgcctatctgctcattctggcggcgcaaatgagctacggcgcctgtctcctgggcgagcatggcgccgcgctggtgtcgcacacgctgcgctttgtggaggccaagatgtcctcgtgtcgcgtacgcgcctttcgccgcttctaccacgaatgctcgcagaccatgctgcacgaatacgtcagaaagaacgtggagcgtctgttggccacgagcgacgggctgtatttatataacgcctttcggtgcaccaccagcataatctgcgaggaggaccttgacggtgactgccgccaactgttccccgagtaaccgggacgcggaacgtgacggttgctgaggggaaaggcaacagagaaggtacaaacccaccggcggggaaaataccgaggcgccgccatcatcatgtggggcgtctcgagtttggactacgacgacgatgaggagctcacccggctgctggcggtttgggacgatgagcccctcagtctctttctcatgaacacctttttgctgcaccaggagggcttccgtaatctgccctttacggtgctgcgtttgtcttacgcctaccgcatcttcgccaagatgctgcgggcccacggtacgccagtagccgaggactttatgacgcgcgtggccgcgctggctcgcgacgagggtctgcgcgacattttgggtcagcggcacgccgccgaagcctcgcgcgccgagatcgccgaggccctggagcgcgtggccgagcggtgcgacgaccggcacggcggctcggacgactacgtgtggcttagccggttgctggatttggcgcccaactatcggcaggtcgagctcttccagttgctggaaaaggaatcgcgcggacagtcgcgcaactcggtgtggcatctgttgcgtatggacacggtctcggccaccaagttctacgaggccttcgtcagcggctgtctgcccggcgccgcggcggcggacggttcgggtggcggcggctcgcactacacgggctcgcgcgccggcgtctcgccgggcatccagttcggtatcaaacacgagggcttagtcaaaacgctggtggaatgttacgtgatgcacggacgcgagccggtgcgcgacggcctcggtctgctcatcgaccccacgtcggggctgctgggcgcttccatggacctgtgcttcggcgtgctcaagcagggcagcggtcgcaccttgctggtggaaccgtgcgcgcgcgtctacgagatcaagtgccgctacaaatatttgcgcaaaaaggaggacccctttgtgcagaacgtgctgcggaggcacgacgcggcggccgtggcctcgctgttgcagtcacacccggtgccgggcgtggagtttcgcggtgaacgcgagaccccgtcggcacgcgagtttctgctttcgcacgacgcggcgctcttcagggccacgctcaagcgcgcgcgcccgctcaagccgcccgaaccgctgcgcgagtacctggccgatctgctgtatctcaataaggccgagtgttcggaagtgattgtgtttgacgccaagcacctgaatgacgacaacagcgacggggacgccacgaccactattaacgcgagtctcgacctagccgcgggcgacgccgctggcggcggcgctgatcaccacctgcggggcagcccgggcgattcgccgccgccgatacctttcgaggacgaaaacacgcccgagctgctgggccggctcaacgtgtacgaggtagcgcgcttttcactgccggcttttgtcaatccgcgtcaccagtattactttcagatgctcattcagcagtacgtgctcagccaatactatataaagaagcatccggacccggagcggatcgatttccgtgacctgcctaccgtctacctggtctcggccatcttccgcgagcgcgaggaaagcgaactgggctgcgagttgctggccggcggtcgcgttttccactgcgaccacattccgctcctgctcatcgtcacgcccgtggtctttgaccctcagtttacgcgccatgccgtctctaccgtgctagaccgttggagtcgcgacctgtcccgcaagacgaacctaccgatatgggtgccgaactctgcaaacgaatatgttgtgagttcggtaccacgcccggtgagcccctgaaagatgctctgggtcgccaggtgtctctacgctcctacgacaacatccctccgacttcctcctcggacgaaggggaggacgatgacgacggggaggatgacgataacgaggagcggcaacagaagctgcggctctgcggtagtggctgcgggggaaacgacagtagtagcggcagccaccgcgaggccgcccacgacagctccaagaaaaacgcggtgcgctcgacgtttcgcgaggacaaggctccgaaaccgagcaagcggtcaaaaaagaaaaagaaaccctcaaaacatcaccaccatcagcaaagctccattatgcaggagacggacgacctagacgaagaggacacctcaatttacctgtccccgcccccggtcccccccgtccaggtggtggctaagcgactgccgcggcccgacacacccaggactccgcgccaaaagaagatttcacaacgtccacccacccccgggacaaaaaagcccgccgcctccttgcccttttaactcataaactttcaggtctcgcgtacgattcgcgagtcgggaatgggacacccgtgggtgtttctccgtgtgtatattatttttttttgtgtgtgtgtgtgtttgcgcccccgtgtgtctaatgtgctgtttgaaacacgtaaagtagctggtggaagaacagataaacctttaataaaaaaaaagtatgtgctcccgacccacggtctgcgtgtctcttttttatgtccatgtctccaagtctggtgcgggtggcggcggggtcaagcgtcctcgaagtcttcatcatcgtcgtcgtcctcttgttcgcggaggcgacggctttccaagctgtcgtggtgactgagcgcagcgacttcttcgccggaggctgtggccagcgcctggtacttgacactgccgctaccgcgtccgcgaaagtagcggacggcgcgacacgtcgtaaacatggcccatatgaaaaagagcatgccgaacgaccagctgatgccggtgcggtattcgttgctgaggaaggtatcgtactgcacgatggggtagatgaggccgcagagtccaaagaaggcgcccaggtggtagccgaattgcaccttgacgtattgaaaaaagacggcctcgatcagtaaaaagtagatgatggagatgatagcgtagaccacgaagacggctaacaccatgtggcctgtacgcacgaaaaagttgtttccgaagccgtagcacagggccatggctaccacggtggtgttgaaaccaagcgctacctccaccaggttgacgatgagcgtgcggaactgcaccgtacctttgagcttggggtgcagacgcgagaagaaaaagagtgagcgtttgtagctgcggtactgcgtgaccatgctcacgttgaaaatggtcaggcagaaaaagtgcacggcggccatgaaggcgatcatgctgggcagccgaaatgacatggtcagtgtgaatagttggaacgtgtccatgctgagaatgaagaggaaggctgtgaggctgtcgcccatgtacgaaatgtcgcgtgtcgactggtttaggctcatgcctttgtccttgcgcatgctgatcttgatccagcataccaggtagtagatggtcacggctaaaaagacgagctgcatgaacacggcgtagcacaccaactgcaccgagtctaagaaaagcataggcgtgtgcaggtgcattacgttgtaggccgacatgttgagcctttcaaagtccacgacgtgatagtagacgcaggggtagcccaggtgcggaaaattgctcagcactagatgcacgctgacgttgacaaaagtgagcaccatgaaaacgatagaagcgctccatgtccgtgtattcactttatccacgtgcgagggggccatggcgatagcggcggcccgctcgctcgggaggcgatgggggcgcgccgatgacgacaggctcgcgggtcgttaaatactacgatgggagccgccgcggctcacgacgcggtttgagcacgtccgggcgatcggtgaaaaaagaccccgcgggccttcgcgactctcttctgtccgaggatgaccgctcagccgccgctgcaccaccgccaccacccgtacaccctgttcgggaccagctgtcatctcagctggtacggccttctggaggcctcggtgcctatcgtacaatgtctgtttttggatctgggtggcggccgtgccgagccgcggcttcacacgttcgtggtgcgcggtgaccgtctgccgccggctgaggtgcgtgctgtgcatcgtgccagctacgccgcgctggcctcggccgtgactacggacgccgacgagcgccggcgcggcctagagcagcgtagcgccgtgttggcgcgcgtgttgctagaaggcagcgcgttaatccgcgtgttggcgcgcaccttcacgccggtgcagattcagacggacgctagcggcgtggagattttggaggccgcaccggcactgggcgtggaaaccgcagcgctatcgaacgcgcttagtcttttccacgtagccaagctagtggtcatcggctcgtatcccgaagtgcacgagccgcgtgtggtcacgcatgccgcggaacgcgtctccgaagagtatggcacccacgcgcacaaaaaattgcgtcgcggttactacgcctacgatttggccatgtcgtttcgcgtcggcactcacaagtatgtgctggagcgcgacgacgaggccgtcctggcacgcctctttgaggtgcgcgaggtgtgttttttgcgcacctgtctgcgtctggtcacgcctgtcggtttcgtggccgtggcagtgaccgacgagcagtgttgtttattgctgcagtcggcctggactcacctttacgacgtgcttttccgtggtttcgctgggcagccgccgttacgcgactacctggggccggacctttttgagacgggcggcgcccgttctttcttttttcccggtttcccacccgtgcccgtctacgcggtccacggtctgcacacgttaatgcgcgagacggcgttggacgcggcggctgaggtgctctcgtggtgcggcctgcccgacatcgtgggctcggccggcaagctggaggtggaaccctgcgcgctctcgctcggcgtgcccgaggatgagtggcaggtcttcggcaccgaggccggcggcggcgccgtgcgtctcaatgccacggcttttcgcgagcgaccggccggcggcgatcgtcgctggctgttgccgccgctgccgcgtgacgacggcgacggtgaaaacaacgtcgtggaagtcagcagcagcaccggcggtgcgcacccgccgagcgacgacgctactttcaccgtgcacgttcgcgacgccacgctacatcgagtgctcatcgtggatttggtcgagcgcgtgctggccaagtgtgtacgcgcgcgcgacttcaatccctacgtgcgttatagtcatcgactccacacttatgcggtttgtgaaaagtttattgaaaatctgcgttttcgctcgcgacgcgccttctggcagatccagagtctgctgggctacatctccgagcacgttacgtcagcctgcgcttcggccggccttttgtgggttctgtcgcgtggacaccgcgagttttatgtctacgacggctattcgggtcacggacccgtctcggccgaagtgtgcgtgcggactgtggtcgactgttattggcgcaaactttttggcggcgacgatccgggtcccacctgtcgtgttcaagagagcgcgcccggcgtgctgttggtttggggcgacgagcggttggtgggtcccttcaacttcttctacggcaacggcggcgccggtggtagtccgctccacggggtggtgggtggtttcgcggcgggacattgtggcggcgcttgttgcgcgggctgcgtcgtcactcaccgccattctagcggtggcggcggcggtggtggtggcgtgggcgacacggaccacgcgagtggcggcggtctagatgccgctgccgggagtggtcataacggcggtagtgatcgggtttctccctccacgccgcccgcggcgttaggtggctgttgctgcgcggccggtggcgactggctctcggccgtgggtcatgttctgggccggctgccggcgctgttacgggagcgcgtgagcgtgtccgagctggaagccgtgtaccgcgagatcctctttcgcttcgtggctcgccgcaacgacgtggacttttggttactgcgcttccagcccggtgaaaacgaagtaaggccgcacgccggggtgattgactgcgcgcccttccacggcgtgtgggccgagcagggccagatcatcgtacagtcacgcgatacggcgttagcggccgatatcggctacggcgtctatgtggacaaggcctttgccatgctcacggcttgcgtggaggtctgggcgcgagagttattgtcgtcctccaccgcttccaccaccgcttgttcttcttcttccgttctctcttccgccttgccgtccgtcacttcgtcctcttcgggcacggcgacggtgtctcctccgtcttgttcttcttcgtcggcgacttggctcgaggagcgcgacgagtgggtgcgttcgctggcggttgacgcgcaacacgctgctaagcgggtggcttccgagggcctgcggtttttccggctcaacgcttaacgagtcacgtaggggaactacgtgggtaagtgacgtggatactagtaaaaaaagtgcgtcaaagttctcagcgtgtgacgtggatactagtaaaagggacgtcaaagctcactacgtgttgcgtgttttttttttttctatgatatgcgtgtctagttcgcttctcactcttcctctccccgttcccagcgcggtggcagcttggggggtgagggcaaattggggtagttggcgttgagcacgtctagcaggcccaggcccacgggccaaccgtccacggtcttacgctcggtcagcttgaggctaaacgagtgtgcctcgtcttgaccggtaaggcggaaaaagaagcgtgctaccagctgcaggcaggtatgccgcgtctgctggaagagcacgaaggtagcgggcacgtactgcacaatgtgcggttctttttcctcaaagagtaggtagagcgcgctgcagatcagccgccgggcgctgtggtgcagcagccggccgaagctttcgcgcacgttcactgcgtccaggtactggagcaggtcgtgcaggcacttgcgcgttaagttgcaattttccacgcatgaaataacggtacagagcgcgaagtgcagcaggttgtcggccttgacgatgccgcagcggtgtttgagccgcagatccgagagcctcacctgcgtgacgacgtcttcggtctcgagcaaaaacacggcggagtagcccagaaaggccgaggtgcacagcaactcgctgcggtactcggccatggaaaccagcagcccgtgctccgtgtgcagccacagcttgtcgccgcgcaccgtaaagtcgagcacttgcggctccatgatcatcacattctgtctagtgaaatccgtatggacctccagcacgccgcggatcatcagggcctccatttcgaaatcggccgacacgctctgggccgcgccgctcctcgtctgccgtgatcaagcggcgcggcgcggacctttcaagcgttcctgggccgccgctcgaggcagttcccctttctggcactccgcccgccgcttcgcggctcatttggcgccggcgcgccttctcgcggctgcaaatcagctccacgtatcggcaaaacttgctgtcgtcgtaggcggcggccacgatctcgccgaaggagagctgcaggtaggcttcgggtacggggtccagcgtgcctagcgccaggatgtgacacagatagggcagggtcacgcgctctaccgtgtaattggagtagacgatggcctcttcggccccttgatgcgtgaccagacgccgtaggcgaaaggtgcggaaatactcgttttcccacaactgcgtgaggaagcgttctagcgactcggtgccaggcacgaactgcgagaagaagctgttggccaccaggcggttgtcttccaccgccagcggacggaagggcgccgcgtcgcgcgccttgcgcacggcctccaacacgggcaggtggtagagttcggcgtcgcgcgcgcccaggctcatggagtcctcgcgccgcgaggcgtagcgcgtgagcaggtcgcgcagctcgcgcacgcgattctcccaggtctggttgagcgtgcgcaggtcctggatctcgtccacctgcgactggatctgctcctccaggcacttgatgacctgcttcttaaacaggtcgcggatgtcccgctcgggcgccgccgggccgggtggcggcggcagcagcccgacgtggcccgcgggtcctcccaccacggcgccgccgggtcccaccacgccgggtccacccggaccacgcgcgggtagtagacggttttggtccaccagcgagggggtcaggtcctgcagaaaggactcgacgctgtcctcgatgccgatgcgcgatttgctgtccgagacgttaagcaaaaacttcataatggactttttggcgtcgctgccccggtcgtgctgctccatcatctccaccagcttcttgcagttgagctcgtggcggctggcggtcaccactttcacaggaaaggtattgagcagctggcagatcttttggtggcggcagagcccgtcgtagcgcagaatctcctcgtgcaggtgtgccaccggcgtggtgaacagcagcttgtcgcgctcataagccagcggttcggccgccacgtacaagcggatgtgcttgccgcgcagctgcgcctccagccgctccgagcgcaccttcttgaagacgcgtacctcgggcgcgttggctacgcgcacggcgcccaggcgctcggccacctgcagcagcagcgccaggttagcctgcagcaggtcctgcgccagcgggtgtgtctcggtggcccgctgcacggccgcgcgtacaaattgcgcccgctcggccgcctcgctcggcttggttttcacgtccagcagcggtaccagtcccaccgttacgcaccaatccacgtagagaccatagtcgtcgttatcggcgtactgatataaaatgtcgcggagcgcgcccagcacgcccgtttgcacgctctggcgcaacgaggcgctccacaccaacagatactgctccaggtcctcttcgtccagcgcgcggtagggaaacagcgccgcgtgtaacttccactcctcggccacgcgccgcaccgtgatggtgtcaaagagcgtcttgcacactccgtagagcagctgcttgcgcagcacgcacgggtcgcgcagcacctggtgcatgctctggccgcgacacgtccccagaaagccgtgcagcaaccgcaggaagctcatcgtctggcccgtggggaaaatgtcgatgacggcctcgtcatccacgccgcggcccacgcccaagtacgacgacgccttgatcctcaacctctcgtcggctgccaagatcgaacggatcgtcgacaaggtcaagtctctctcgcgcgagcgctttgcgcccgaggatttttcgttccagtggtttcgctccatcagtcgcgttgaacgaacgacagataacaacccctctgccgcaactaccgccgcggcaacgacgaccgttcactcctccgcctcctcttctgccgccgctgccgcttcgtccgaggccggcggcacgcgcgtaccctgcgtcgaccgttggcccttctttcccttccgcgcgctgctcgtcaccggcacggcgggcgccggcaagacttccagcatccaggtgctggcggccaatctagattgcgtgatcaccggtaccacggtgatcgccgcgcagaacctcagcgcgatcctcaaccgcactcgctcggcgcaggtcaagaccatctaccgcgtcttcggtttcgtcagcaagcacgtgccgctggctgatagcgccgttagccacgagacgctggaacgctaccgcgtgtgcgagccgcacgaggagaccaccatccagcgcctgcagatcaacgatctgctcgcctactggccggtcatcgccgacatcgtggacaaatgcttaaatatgtgggagcgcaaggccgcttcggcctccgccgcggccgcggccgccgcctgcgaggacctctcggagctgtgcgagagcaatatcatcgtcatcgacgagtgcggccttatgctgcgctacatgctgcaggtggtggtgtttttttactacttttacaacgccctgggcgacacgcgactttaccgcgaacgccgcgtgccctgcatcatctgcgtcggttcgcccacgcagaccgaggcgctggagagccgctacgaccactacacgcaaaacaagagcgtgcgcaagggcgttgacgtgctctcggcgctgattcagaacgaggtgctcatcaactactgcgacatcgccgacaactgggtcatgtttattcacaacaagcgttgcaccgacctggactttggcgacctgctcaagtacatggagttcggtatcccgctcaaggaggagcacgtggcctacgtggaccgcttcgtgcggccgcccagctccatccgcaacccctcgtacgccgccgagatgacgcggctttttctctcgcacgtcgaggtgcaggcttacttcaagcggctgcacgagcagatccgcctgagcgagcgccaccgtctcttcgatctgcccgtctactgcgtggtcaacaaccgcgcgtaccaggagctctgcgagctggccgacccgctgggcgactcgccgcagcccgtcgagctctggttccgccagaacttggcgcgcatcattaactactcgcagtttgtcgaccacaacctctccagcgagatcaccaaggaggcgctgcgccccgcggccgacgtcgttgccaccaacaactcctccgtccaggctcacggagggggaggatctgtcatcgggagcaccggcggcaacgacgagacggcgtttttccaggacgatgataccaccaccgcgcccgatagccgtgagacgctgctcaccttgcgcattacctacatcaagggcagttcggtgggagtcaactctaaggtgcgggcctgtgttatcggataccagggcacggtcgaacgtttcgtggacatcttgcaaaaggacacgtttatcgaacgcacgccctgcgagcaggcggcctacgcctactcgttagtttcgggcctgctcttctcggccatgtactacttctacgtgtcgccctacacgaccgaggagatgttgcgtgagctggcgcgcgttgagctgcccgacgtgagttcgctctgcgccgctgccgccgccacggccgccgctcccgcttggagcgggggagagaatccgataaataatcacgtcgacgcggattcttctcagggcggccagagcgtgccggtatctcaacggatggaacatggccaagaggaaacccacgacatcccctgcctgtccagccaccatgacgactcggacgccatcacggacgccgaactcatggatcacaccagtctgtacgcggatcccttttttctcaaatacgtcaagccacctagcctggcgctgctttctttcgaggagacggtgcacatgtacactaccttccgcgacatttttctcaagcgctaccagctcatgcagcgtctcacgggcggtcgcttcgccacgttgccgctcgttacctacaatcgccgtaacgtggtgttcaaggccaactgtcagatcagctcgcaaaccggctccttcgtgggcatgctttcgcatgtgtcgccggcgcagacgtacacgctcgagggctacaccagcgacaacgtgctcagtctgcccagtgaccgccaccgcatccaccccgaggtggtgcagcgcggtctttcgcggctggtactacgcgatgcgctcgggttcctctttgtgctcgacgttaacgtctcgcgcttcgtcgagtcggcgcagggcaagagtctgcacgtgtgcaccaccgtggactacggcctcacttcgcgcacggccatgaccatcgccaagagtcagggcctgtcgctcgagaaggtggccgtggactttggggaccatcccaagaacctcaagatgagccacatctacgtggccatgtcgcgagtcacggaccccgagcacctcatgatgaacgttaacccgttgcgactgccctatgagaagaacaccgctatcaccccctatatctgtcgcgcgctcaaagacaaacgcaccacgcttattttttgacacaacaccgtgtaagcaaaacgtgactttattgagcagggtaaaaaccacgtacaagaaccacgttgtctatccccccaaaaaaaaacacaccgtcagggaacacatcgcctatagatagcggcactttacataaaaccaccgtacctgcatcacggtggctcgatacactggaaattcaataaaaaccaccgtgtccacgttacggtacttgccgggtcagcgtccttctcttgagatttctgttcgcaaacttatccgtttccccggtccgcggtgtctcctcgcgaggctgacagtctacgagtggtatctacaagagaaagaaacccgggtgggagcgacgccgtcgctgggtatcaaccccgcggctgaccgtcgtccggtaaaggaacaacccgtcgtcgcaagccgggttcgaccaagagaaaaaaacccgggtgcggggggagacgggtcgtcctttggtcgttcgcggacggcgtacatgccgcgtgggtcagtcgacggcgtcgctccgtgcggtcggtcatcattctgcttcacatatatgggttgtttgtgttttttttataatgaatacgcactcatcctatccgtgactgcgcgtgtggcagagaggatgccttataacatgtattttgaaaaattgccaacagctataatttctctcatgtagcagaatagagaccttttgtcgtctttttgtttgtcattacttgttttccagggaattagagagagggaaccgcgcctccggcggcggtgcccgcggaccccggccccttctcgcgtgcgcggtgtgactggttgagcgaatgagcagctaggcttggtggtgctccgcgtgcgggggagaagacgattaacaacaaaaaataagtggaagtggccggtgggtctttgtccgcgtgcgcgcccatccgtcgccgggaccgagcagaaagtgatgtggtggtacattgattttttccttgacaggaaagaaaaaaaagagttttgttttcctatgtgagaggagaaaggtatgtgaggagatgttcgatgatcgtatgttacagttatgctgtaaggaagcttttatcgtgcgtcctgtttttcatttgatgtatatgacacaattgaaacctatcgataggcgtatatcgaggattcatcaattcttagaatcgtcgtctttttggctaattggactttgcccatgttggttgtcattcgtggcctgaggtcatcgtcgtccacgacgacgtgtctatagcgtgcggtgtgatcattgtgtcgagccagagaaagcgcgcctcgcacgacgtttgcggatcggctcgcgggtgtgtggaattcctaagaacataatcagctggtcgtctttctttgatgtgttgttgtcgtcgaggtcttgcttcgttttcttttttctttttagtcgatggaacttttcttcggtacgggttcttgttatggaagcttgtgttttcgaacatgaattcgaaaaaataaaaaggcctatcttcgtttcaaaaaaaggacagatatcaatcttcttaacttatatcatggtaaattcagaatcctatggtgtcttattatctctaaagtagtcaacattatggtctaacttgtatttccctgacgagatatatatgatccttataacctggctactatcatgaacaacaatatccttacttacagtcatcttcgtgagttaatgaagtataatatcggtcatctatcaacttatctgctatgtaacgtacccttttaggtattttgcgtttcttaacgagtgtacccgcctgtgtgaggcgaaactctgagaagtctaccgagtcgagttacaagtcactaaaacacttacacgagttatctatactaaaatcactatctatgttgtttgcttacctaattattatcctacatgacgaagctacctcccaacgtaaggtagggggagaggagacagaacaataaaaagtaactaatgtttcttagaacttacccgctaaggacttaccaaactatattcaccaaaaaacaacagctacgtgtttcatttgttttaatctaccgaagtaaaaaaaaaaaagatgattagctatccagaacctacttacttcttaatgttttaactaaggatgcctatgggattggaaaaaaaatcacagcaacttgctactaatcagttgacagcgaagagactcataacaaagatttctgggtaatacggttataataatgcttatggactaaaggatacttggaaaaaaagaacgggctatgactatagagattcgtcgagatattaaacttcaaataggcggctatcattcatggttgtggtgactatatcgtggagaaaaaatgtgatcgttagttagctaggtgagacttacagctatccatccgtctagtttttcgttgtaatgatgatagtacgtctatggtggtgatcgattttggttaacaatttgttcgtttaaaggcttaatgtacttatgctacatgatgtattattctttgattcatcgttcctcctaagggggtgtatgtatgtatgtactagtcgtatagtgttcctaacatcatgattattcagactatggcttcatctatcgtgtctaaagttcacttattctactattactatatatatgcactactatgtaactaggatatggtcctataaggtgtcttctatcacggtggcttgtttatcgcttggcggttacgagcaagagttcatcacggaccagccgtgaggcagggcacacgcgggtcggcggcgatgatgtcccccgcgaaggggacaacaaaaacaagacaagaggccgccggccgcggccacggacgcgtagcggttacacaatgtttggttgagcgttttgtttcatcgtcgtggtggtggttttgttgttctctgtatatatcgtgtggtggctttatcgtcatcattattatcatcattcttgtttccatcatcacgatgagttttctccgttttcctctcctccagtggtagtcgtgtatcatcatcaatcatcgtagtgacgtcgttgctgctgctgctcttgccttcatggcggtatttctcttcctcccccctaaccccatattaactcgtgagtgtgatggttagagtggctgcttgtttttttttcttttctctttggaacaacaaaagaggataaagatggtcggtgaatgtattattattattatcatcattatgatacggtcgcggtcttcttctccgatgacgaaacctgcgcacatcgaagaaaagacgagcgcgcgaaccgatagccgtccgtctgggacgaaggagaagatgatggggagaggaggagagccccagaagccagagcgagaagggagacgacagacatacgtcgtcaccgtcctctggaggaggcacggcggcgctgtttgttgtttggatgcttgattatatcctgttctatggggtagattattatcaataggcttggttttcaaaggtcagcctgtgtattgtcgtgtcttttttttcgttctcatgatcgcggagaccacacagacgtgcgcgtctcccaatggctaggcgttctttttaggtagtaattttttgatcttttttttttcttaacaagtctggcttgatttcttttatctatgatcgattcttctttttctcgggggttgcatcttccgtgaaagtaaagtgacactactctaaatggtaaccatattatctgttgattaggagaaaaaataattttttcgcacgaaatcgatcctaagtgaggtgatttacttgctatcacacgaaatgattatcttttgctgctaacgtactgaattttttaacagaattgcttctccgtaactatttccgcagattcagacagattgtcaaaaaaaaatacggcacagaaatagtgggtctgtggcttttggttcgtgtacattcgcgtttgcgtgtcgagatttctacggtatgtttattcttcctgcgatgatgtagggtccttggtgtaagtaggatttcgagtatctctcttagagcgaacaaaataatcaaaaaacaacagctaggaaatcgagggttactctacgataaagtgtctctacaaagtgaagaatgttacgttgtggtggaataataagactcgcgtgatcgatgagtgatcgagagcggctcgaaccttctttaagagctttgtttagtgcaactttaaattacaaggagtagaaagctgaaatgaatctatgaaggtgctattctttgaatatcttactttgtacgcttcacattcgttatttggatagagagttgtctagagaaaatctgtgattctctatgagtgttatttttattatccttttggggactacgatttttcttcttgttctacataccactactactcgtaatcacatacatggacgaaaaaaaaattcgtcaggcagtagataccagattctccgacgttacggcgtctttttttcttttgagagagtatctgctgagattgtccgtggtgtatctagtcgctatttttgttgttactagtagttttgcacacagtttattcagtataatttttcttcttgccatgatcaattgagcccaccaccttttttttttagagaggaggaatttcgtcttgatctccagccggagacaacggcggcggtggtggtggcgggagagatttcaaggcaatgaaaaaaaaaatttcgttttgccatcaagtggtgacgataacccgtcagattgataattggttcctacagaaactattctaaccgcggaagaaagaaattgaaaaaaaaaattgacaaaaacatcataacataaaggaccacctacctgggacgcgcagttgggcggcggactggggcggcatgctgcggcgatgctgtcggtgatggtctcttcctctctggtcctgatcgtcttttttctaggcgcttccgaggaggcgaagccggcgacgacgacgacgacgataaagaatacaaagccgcggtgtcgtccggaggattacgcgaccagattgcaagatctccgcgtcacctttcatcgagtaaaacctacgttggtaggtcacgtaggtacggtttattgcgacggtctttcttttccgcgtgtcgggtgacgtagttttcctcttgtagcaacgtgaggacgactactccgtgtggctcgacggtacggtggtcaaaggctgttggggatgcagcgtcatggactggttgttgaggcggtatctggagatcgtgttccccgcaggcgaccacgtctatcctggacttaagacggaattgcatagtatgcgctcgacgctagaatccatctacaaagacatgcggcaatgcgtaagtgtctctgtggcggcgctgtccgcgcagaggtaacaacgtgttcatagcacggtgttttacttttgtcgggctcccagcctctgttaggttgcggagataagtccgtgattagtcggctgtctcaggaggcggaaaggaaatcggataacggcacgcggaaaggtctcagcgagttggacacgttgtttagccgtctcgaagagtatctgcactcgagaaagtagcgttgcgatttgcagtccgctccggtgtcgttcacccagttactttaataaacgtactgtttaaccacgttgcgtcgtgacgttgtttgtgggtgttgctaggcgggctggaaagatgatgtataaatagagtctgcgacggggttcggcgctctgccggctgcggcggcactcgctccacggcctccgacgagcgttgcgctcgcgctttgcgccgccgcgtcatggatctgcctactaccgtcgtgcgaaaatactggacttttacgaatcctaaccgcatcctgcatcagagcgtcaatcagactttcgacgtgcgccagttcgtctttgacaacgcccgtctggtcaactgcgtggacggcgatggcaaggtgctgcaccttaacaagggctggctctgcgctaccattatgcagcacggcgaggcttcggccggcgccaagacgcagcagggcttcatgtccattgacattacgggcgacggggaacttcaggagcacctctttgtacgcggcggtatcgtctttaacaaatccgtctcctcggtggtgggctccagcggacccaatgagagcgcgctgctcactatgatttccgagaacggtaatttgcaagtgacttacgtgcggcattacctgaaaaaccacggcgaatcctccagcggaggcggtggttgcggtgccgcgtctaccgcctccgccgtctgcgtgtcctcgctgggtggcagcggcgggactcgcgacggcccttctgcggaggaacagcaacggcgaaggcaggaacagcgtcacgaagaacggcgcaaaaaatcgtcctcgtctgccggtggtggtggaggcggcggcactggtggtggcggtggcggcggcgggagcggcggtcagcactcctcggactccgccaacggactgctgcgggatccccggttgatgaaccggcagaaggagcggcggccgcctccctcctccgagaacgacggtgagtcccggccctcctcgcgtcacggtgctttccgagtggactcgtgagccccccgtagcgcacgagcgagcaggcgagcggtgttggtgcgctggtggttgtgtggatgataaccatgtgctttttcgtgcgctatgtgtcgtcccgtctgtaggctctcctcccctccgggaggcgaagagacaaaagaccaccgcacagcacgaaggccatggcggcggcggcaagaacgagacggagcagcagtccggtggtgctggcggtggtggtggcggcggcagcggccgcatgtcgctgccgctggacacgtctgaagcggtggcctttctcaattactcgtcctcatcctccgcggtctcttcttcctccaacaaccaccaccaccatcatcaccaccataacgccgtgacggacgtggccgccggcaccgacggtgcgttacttctacccattgagcgcggagcggtggtttcgtcgccgtcgtcgacgtcgccgtcgtcacttctttcgctccctcgacccagcagcgcccacagcgcgggcgagacggtgcaggagtccgaggcggcggcgacggcggcggctgcggggttaatgatgatgaggaggatgaggagggctccggctgaggcggcggaggcaccaccgcagtcggaggaggagaatgattccaccactccagtctctaactgccgtgttcctccgaattcgcaggaatccgcggcgcctcagcctcctcgcagtccgcgttttgatgacattatacagtcattgaccaaaatgctcaatgattgtaaggagaaaagattgtgcgatctccccctggtttccagcagactcttgccagagacgtcgggcgggactgtcgtcgtcaaccacagcagcgtcgcgaggaccgccgcagctgtctccacagccggcgttggccccccagcagccgcatgtccgccactcgtcaccaccggtgttgtaccctcaggttccgtcgccggtgtcgcgcccgttgccgccgcagtcgaaacaccagctgctcctccccggcccgtgtgtgaaatcaagccctacgtggtaaaccccgttgtcgccaccgccgcggctgccagtaactcttcctcgtcttcttcggctccactgccgccgccgccaccaccgccgggcggacgtcggggtcgggcccggaacaatacccgaggaggcggcggtggtggcggtggtagaaacagccggcggcaggccgcatcgtcgtcgtcctcctcctctcggagatcgcgacggagaaacaaccgccacgaggacgaggacaacgatcctctgctccggttgtcgcaagtcgccggcagcggccgccggcgagggccctcgttcctcgaggacggactcgaaattatcgatcccagcgaggaggctgcgatcgccgccgcctcgatcgcggcgtttttcgacgattaaaaaaccgagccgagaccggaaaaattatgaaacaggacgcgcttggacatttgggtttccacccctttcggtgtgtgtctatatatattgtggtcactgattttttttttacaataaagagatagacatcacagttcaccatcttgtctccccggtgtgtctattatcatcaatcacccacagagtcgccagtccatggtctctcggtaatgcgtgtccagatacgcgttggccagtataaagtggtcgttgcccacgaaggcgcgggtggtgttgcgcggcgacgggtggcaggacttaagtaccaagtgccgccgtcggtcgatcaggtactcgcaggtgtgcgcgtcggcgccccacagcatgaacaccagatgctcccggcgctctgacagcctccggatcacatggttactcagcgtctgccagcctaagtgacggtgagatccaggctgtccgtgcaccacggtgaacacggtgttgagcagcagcacgccgcgtcgcgcccaggcgtccaggcaacccgaggccggacgctgaaacccgtccaccgtacgcgccagttcgcgaaacacgttgttgagggagggcggcggcggtcggcccgccagcgtgccgaaggccaggccgctggcgctgccgtcgcagtacgggtcctggcccacgatcaccacgcgcacctgctcgggcggacacagatagctccagcggtgtacgtgctcgggtgccgggtacaccatctcgagttgccgcgcgccttccaccgccgccaccgtgtcgcgcagcagcaccgtgtcgtggtcgggcaagctgaggaagcggatccagtcggcgctcagacaaaacacgcgagcctgctcgtcgggggttaacagagagcctttattatcagcaatgttagcgagcatccactgcttgagggccatagcgcgagtgagccggcaggttgacgcgcgtctgcttcagctcgggcggcagtccggcgtagtatttatctaggtggcgtagcagcggcgggtccagctggtgacgcaggcagaattccttcaccgcgttgtacaggccgtaaaagagcgtgatgccctcgggcgcggcagcggtgctcacgggcagacgcacggcgcggttggtacgcgtggcttcgttgcgtatggccaccaccacgttaaagagagacggtggcaccagctcgaagcctaacacgtgttccgtgaagatgctgcgcccgtatgacagtcgcgtgaggtcgtagccgcggcacaggtcgtccacgcacgtgtacacggccggcgagccatcgccgcactcgctgtagccgcgcattaccgtcatccagcgcggcgctgtgtccgagcttaacagcgtcagcagggcccgcaattgatccggattgttgtacagcagggccagagtgtccaggaaagcatcgtccaacagcacggagttggcggcctccggcgtaacgggacggtaacggataagttgcgatagcgggccatcgcgcccggtaacattcaccaacgggcgcagccaactttcatacttgtcaccctgaaacacctcacccaacaggcatcggcgcgttagttcggggcactccgcggggactttctcggcggcggtaggagcgacgctgacggcggctgaggaaacaatggacagcagaaggcaacaccacagcagtatcaccggtccaggtgagaaagagaagccgcaatccgggcggcggcacatcaagtctgcggcacgatgagagtgtgacggtaaggagccagttggcgccgaaagttggcactcaggtcttcgatccctaaaacgttatatattgcatccagcaggtgagccaggctaaacggattcacgtaccaggtttggttacccgcgacgatgacggccagaccgtgggcgctacagttggagaggttcctgggtacgaaggtaactgagtcgatgtcgcgccacggggggaatgagacagacgactggcgcacgctgtaatcacaactgtgattgacgtattgtagcgtgtaatttaggttgcactcagcctcgaagtagagggggaaccacagttcgtcgtactcgtcgtcgtcctccagttctggctcttcttcatccaccgcaatgtctacgctgctttgagattcctcttcgtacaggatgattgacaggttatggctacaaaggtcctgggcgggaggacgcgtgggagcgcgggtggtggtaatgttttccagatcaaaagttggagtgtagtcggatgttacatccccgttgttggaggtggtagaagttgcggccggtgtcgcggtggtaagtatggatacagaaggggagggggaagtagcgttcgtaccgatggttgtggtattattattccctgtgtttcttgttccagaaaccgttgacgttgagatgggaatcgacgtggtgctggacgtcagattgctgaccgaggaaaccgtggtgggagtggtgacggtgttactcgtggttgaagtgacgttaggggaggtagtagtggtaccggtggtggcgacggtagtgtttgtcgtggcggcggcagcggtggtaccggtaacggtggtcgcgttggtttccaccgcttcacacagtaagcaaaagcacagagccaggaaaagcaaccagccccgccatcgccgccgccgcttcatgaggtgggcaggcgaaagctggtgaattcgttgtacagcggcaagtggggcgccgcgatcgaagggtacgtcaacaagctgacgttgatattaaatacgtctggctgcttttctacgatggaagcgcacagggttacggcgtcaaacaggtctttcttggtggcgcccgagacccacatctggtatacacccgtctcgtggtacgaagtagagcgcggcaccaccggacggatgcagtccagaacgcggttgggatcttggtgaaagaatttgaacgtggctacggcctgtggcgtgtgcggcatcgtctgcgtgatgagctgctggcccgctaacacggtgacgttgtgcaacttgagcagggcactcttgagggcctggaaagcgttgccgcacgaggcgctgatctgcagctgcacggccgtggagtcgtgcagccgcatgagacgtgacacctcttcgaagacgtacttatacttactggcaaagagtggcgcgtatcgacagtcggccggcaaaatgtaggtggcgttgccgccgttggtagccacggcgggcgcagcggccgcggaggccggcgtaaacagcgtcagcggccggtggtggctggtaaggtcgatcatgggcggcgtggtgaccgtggcggtggcgggcatgacggggtttgcggcgacgggcactccggccacagcggcggccgcggcggccacggcggcgctggccgagcccacacccgccggcagtcctccgctacccatgacgccgccgggcagagcgtcgcccagacagacttccacagtggcgggcgcgctctcggcggtcagtacggtttgccgatcgacctcgcgacgaaagctggtgaggaactcactatgatccatggccgcagggcccgagatcccgggattctgcgggtgctgaccgagtgcgggccgagttatatggaagacgattagcttggagcggagttttgcgtccctagctgacctgcggatcagcgacgtaccatagggatagactgtgagcggcggccgcaacggcggggtcggccgccgttcgtcgtcacggggcggcgcgagggaggaggaggtggtgggtacgatcttgacgtggttgacgtcctgcccgtccgggggaatacgcaaaaaaacccgtcgcggcgctaccacgatggtgcgatgggtctttctcttgttggccggggccagggacttgcagatgcgtgtggagccgtagacgatctggacgtggtcctgggagaacatgaccatcgccgccaacgctcagcggggggacgtattgggaacacagaggatgagggaaaactccgtagaagtcagcgaaataaagacaacacagcagccactcctctcgtctcgggccctaccactgcttgaagtagggcaccgggtgtttcttttcctcaacgggctcctccagtctcttataggaccagtcccgccggcgcgccagcatgtaggtcacgtacaaaagaataatcaccatgaacaccaggaaagccagcacgccgtaggccagcagccggtcctcgaacagcgggtcgctcttgataaacacgtaggtggtggtaaaacttcggcccgcgatctgaacgtggagacgcacgacagtatacgtgccgttgaggtagaagacaaactcgcgtaaccgttgtccgttatacgtcacgttactaatattccacggcggaatgagctggttgccctgatgcagatgcacggtgctgttggggtgatagaggctgctaccgttgagcaagcagtgttcgtgttcctgaagcagcacgcggacccgcatcgtggtagcgttcaagcgagtcccgtacacggcgtagatgggataggtgaaaaggtcccaagtggcgttgtgatggcggccccagctgaagaaagagcacgtgtactcagtggtctcctgcggcctgagtcccgagataagcagctcttgagcagtagcgttgtaggagagatgtagttttcctgtggaaaaaattaatgagttgtttattttgttagcaggttggcgagggaggaaggagaacaaaacagaaaggtacgtgttacttacctttatcgttggagggaaaagcgctaagataccccacctgagtgaagggacccttgcagtctgtccgtgcataacaagtaactgataaaatgtctggatttttggtattattcaacaggattactttgcaggtggcgtttagagacacttggtcgtagctgtagctggcttcgcaattcacagtatacaggtgcccctctttctgcgtcgtggctatcacggaggtggaggcggacgaggtagaggtttgtaccgtggtggtgacagcagaagtgacgttgttagaggtacttattgacgtagtagacgtgacggtggtattactaggggaagtgacggcgcttgtggtgctacttttcactctcgggtgcatgtcgcccaagagcgcaactacgagcgcgatcgccagcacggaacacatgttgccgtgtgacgagacggcgtgtggacgagctatatgtggcaggaggtcgcgtcacctcttgtgacgcctaaacgtccagctccagataaaagaggcgttaataatgaagaccacaaaaaccacttgcgtcagtatgacaatcataaaggctcggtgattgctacgcctaaagtacgcgggattatccaccagttcatcctgctgaacaaagtggatgattgacgtgctggtgttaccggccgtcgtattgatcatggattttactaagaaagttttggcaccaaaagtcccgttagagccccagcaggtaacgctgccgttcacataggctcccggtgcccctgtcagcatgcgtttcagttcatgagtataatttttcctatcgttatacatatcatcactgtagttgactttgctggtgagaaactgtgtgttctgtggaatactgatcatcatccccgaggccaaaaagggcgaatcgcaagctgtagtgttacagaaaatagtcaggttagtgtcattatgctcatacatataagccacgctaacctggggctcataccacccaatcgcaaccgccagcacgtcccatctcccgacatttatcaccgccaccactaacaacgtcacccccgcacggtacatagttaccctctcgacgtcgccggctgtcaatgacgtgcctgcgtcagtggctatgatttatagcttttggacacaaccgcaacggatctgtcgtaatctaccttccacagggccgccgcgacgatgctgaacgacaggatcagacagacggcgtataggagtcctaggtcggcgtcgacgcggcaagtgcggatgtctcgcagggtgggtagatgggcgatgcacaactctttctccccccgcacgtacatcccatctcgtatcagcagccgtagcgtagcattaatggtcagcggggtaaccaaagaaatcacatagggatgtgtacaggaagtacagtgacgggtatccgtgagatgtaagtcatcacccttctcactgttatcatgaaagaccaggactcgggtaagacgacccgatgaatactggatctcccaccacagtctttggtccaacaccgagagggcacaagagattctaagtctccctgggttgggggagcagatgtaagccccgtgtgtgcccctcgccatcagaaccatacacatgagggggaaaaggacaagtatccgggaccacccgcacccccacatcacgagaccagagacggagatgtataaaaaaaagctacttttattaaacagcattctcaccacacgttaatactgtcacggggaatcactatgtacaagagtccatgtctctttccagtttttcacttactgagacttgttcctcaggtcctggatggctgcctcgatggctaggctcagggtgtccaggtcttcgggaggggtctcggtgggctgctcaaactgccccacgtcgtaggccttcgcggccgtctcgtagataggcagcatgaacccaccctggttggtggagaagatgcgcaccatgacctgtttgggaaacttttgcatcaggggcaggcacaggttgagagcgcccaacaggtccacgggggtggcagcgtggatgatcatgttgcggtaatcggaagaacgggggcataattggtgggtgtgcaattctttgaggctccacgcggccttgacgccttcgttacaagcatcggccgtgcgctgcgccacttcgggtgggtgtgtcacaggcatggtgtgctccatgagaaagggagtggagagggccaggttgcacatggtgcccaggcgacaccgcaccgcatccacctcactcttcacctcatgattgcgggtgtagatgatctggatgcccttgttgttcacctgcatggttttgcaagctttgatggcctcatctaacacctggtgcatactgggaatcatgaagggcaggttcttgtattcaagagagcgattggtgttgcggaacatgcggctcacctcgtcaatcttgacgcgaccccgccgagtctgcacgttgggtgtgcagaagggggtgttcttatctttcatgatattgcgcaccttctcgttgtccaactcggagatgcgtttgctcttcttcttgcggggtccggtgctcgccccgccgctgctctgatggccgcagctcagcagagaggaggaggccgcgccaccaaaaccgccgcgcccatggtggctcgaggtcacggatgctcctccgccactgctgcatttcatctcctcggactcactctccgagtccgaagccgaactgcaggaggaggaagacgaagaggaactatcttcatcgggccggcccaagggatcgggaagaggagggtggttcatctgggagagcgggtgcgtgggagaggtcactcgcggcgtgccgctgccggtggaaggggaagacgcggtagcaccgcgggtttcgacttcttcaccctgttcttcctcgctatcagagatcacgatacagccggcggtatcgataatcttgttgcggtactggatggtaaagtcgggctcgggcttgatgtcttcctgtttgatgaggaggggcagcatgataggcgcgggaggcacgggcggtttaataatcaccttgaaaggacgcgtggttttgcgcggtttcttacgcgggctgagctcgggagtagcggatgccccggggagaggagtgttagtaaccgcgacgctggtgggggtcggcttgttaagaggggcgctgctaacgctgcaagagtgggttgtcagcgtgtggccggtgctactggaatcgataccggcatgattgacagcctgggcgaggatgtcacctgatggtgataagaagacacgggagacttagtacggtttcacaggcgtaacacgtttattgagtaggattacagagtataacatagagtataatatagagtatacaatagtgacgtgggatccataacagtaactgatatatatacaatagtttactggtcagccttgcttctagtcaccatagggtgggtgctcttgcctccagaggtggtgggttcctcagcaccatcctcttcttcctctgaggcaacttcccctatctcagacactggctcagacttgacagacacagtgtcctcccgctcctcctgagcaccctccccctgttcctcatcactctgctcactttcttcctgatcactgttctcagccacaatcactgaggacagagggatagtggcgggtacaggggactctgggggtgacaccagagaatcagaggagctagcaccagcggtggccaaagtgtaggctgcaatagcatcttcctcatctgactcctcagcgatggcccgtaggtcatccacactaggagagcagactctcagaggatcggcccccagaatgtactgggcaaagaccttcatgcagatctcctcaatgcggcgcttcatgacattgataacctcaggcttggttatcagaggccgcttggccagcatcacactagtctcctctaagatatagcagcacagcacccgacaaaactcacttaagagagagatggacccgtacatggtcatcatgcaagcgtcactggtgaccttgtactcattacacatggtttccacacatgtagtgaggatatccataaatatgtgatcaatgtgcgtgagcaccttgtctctctcctcatccaaaatcttaaagattttctgggcataagctataatctcatcaggggagcactgaggcaagttctgcaatgccgccatggcctgactgcagccattggtggtcttagggaaggctgagttcttggtaaagaactctatattcctgtagcacatataaatcatttttctcttaagttcatccttcttagcacgggccttagccttcagtgcaccccctaacttgttagcggcgcccttggtcacatcatgcagctccttaatacaagccatccacatctcccgcttatcctcgggtacaatgtagttctcatacatgctctgcatagttagcccaatacacttcatctcctcgaaaggctcatgaaccttatctaagatatctaaggcattctgcaaacatccccccatcatattaaaggcgccagtgaatttctcttccgtctgggtatattttttcagcatgtgctccttgattctatgccgcaccatgtccactcgaaccttaatctgtttgactgtagaggaggataacaacacatataagtatccgtcctcctgactcatttatcgctatctcgatgccccgctcacatgcaagagttaatcttcactctatctgacatacacaagtaaatccacgtcccatgcaggttagtatatatcacatacatgtcaacagacttaccgagttctgccaggacatctttttcggggttctcgttgcaatcctcggtcacttgttcaaaggttttgagagattcttcggccaattctgggaacagcgggtctcccaggctcagctgactgttaacctccttccttaacatagtctgcaggaacgtcgtggccttggtcacgggtgtctcgggcctaaacacatgataaacaaagtcataagcacatgggtcacatacaggaaatatgtatataacattaaagatataactttttattaaaaaaaggggaacacaagtcccgacacgtaccgtggcaccttggaggaagggccctcgtcaggattatcagggtccatctttctcttggcagaggactccatcgtgtcaaggacggtgactgcagaaaagacccatggaaaggaacagtctgttagtctgtcagctattatgtctggtggcgcgcgcggcagcaacgagtactgctcagactacactgccctccaccgttaacagcaccgcaacaggagttacctctgactctcaacagaacacaactcagctgcctgcttcttctgctgctgctgccttaaatcttccatctgcgtcagcggtgcaagcccattccccgagctcattttcagacacataccctaccgccacggccttgtgcggcacactggtggtggtgggcatcgtgctgtgcctaagtctggcctccactgttaggagcaaggagctgccgagcgaccatgagccgctggaggcatgggagcagggctcggatgtagaagctccaccgctaccggagaagagcccatgtccggaacacgtacccgagattcgcgtggagatcccacgctatgtttaataaaaactgcgggcactggggacggtggtgttgtatatgtgaatttgtaaataataaatgagaccccatcctgtaaaaatacagagtccgtgtcagtctctgaaggacagagtattggcatatagccaataaagatagttgtggcaaagagccatgttatggattagtaatggaaagtatcgtcaccaataggggagtggtcaataatggtcaataacccacacctataggctaagctataccatcacctatagcataaggaagcgggggtgtatagaccccaagccaaaaacagtatagcatgcataagaagccaagggggtgggcctatagagtctataggcggtacttacgtcactcttggcacggggaatccgcgttccaatgcaccgttcccggccgcggaggctggatcggtcccggtgtcttctatggaggtcaaaacagcgtggatggcgtctccaggcgatctgacggttcactaaacgagctctgcttatatagacctcccatcgtacacgcctaccgcccatttgcgtcaatggggcggagttattacgacattttggaaagtcccgttgaatttggtgccaaaacaaactcccattgacgtcaatggggtggagacttggaaatccccgtgagtcaaaccgctatccacgcccattgatgtactgccaaaaccgcatcaccatggtaatagcgatgactaatacgtagatgtactgccaagtaggaaagtcccgtaaggtcatgtactgggcataatgccaggcgggccatttaccgtcattgacgtcaatagggggcgtacttggcatatgatacacttgatgtactgccaagtgggcagtttaccgtaaatactcctcccattgacgtcaatggaaagtccctattggcgttactatgggaacatacgtcattattgacgtcaatgggcgggggtcgttgggcggtcagccaggcgggccatttaccgtaagttatgtaacgcggaactccatatatgggctatgaactaatgaccccgtaattgattactattaataactagtcaataatcaatgtcaccatggcggtcatattggacatgagccaatataaatgtacatattatgatatggatacaacgtatgcaatggccattagccaatattgatttatgctatataaccaatgactaatatggctaatggccaatattgattcaatgtatatatcgatatggattggccatgtgccaacttgatgtcgcctctatcggcgatatggcctcatatcgtctgtcacctatatcgaaactgcgatatttgcgacacacagaatcgcccaggtcgccaaagtcgtctatcgccatcccccgtaaacgatataagcgctatcgccagatatcgcgtatgcccaaaaatcacttttggaaaaatggcgatatcagttacacagagactcacatcggcgacattttcaatatgccatattttcaaatatcgatttttccaatatcgccatctctatcggcgataaacaccactatcgcgcgacatgaatttagtcggcgacagaaatctcaaaacgcgtatttcggacaaacacacattttattattcactgcagcatatagcccattttagcgcggcacacatccagccgtttgtgtttcttaacgctctccaggtactgatccaggcccacgatccgggttatcttgtcgtattccaggttgatccatcgatagggaacgctgccagcggcgcccagcaggtactgcgccttgtcgttcactttgccgcagcgtattcgcccgtcagcttcgaggtataacctacaacacggaagggaaggggggtacaaaacgtgaaattagactttttttttaatgatgttttgtccctctctgtcttactctcccataggctgtaaggccctcgaggaagagacttacggattgtagttgcagctcgtcagtttgttgtgtacgacctggcgtgtcaatgaatgggtcatggtggtgatgatcccgcgaatctcagccgttttctcgggactgtagcagacttcgccgtccggacaccgcagcctgtggattcatgaaaatctactctggcattcccgaggatcgtcgatggaacatggctatcagaaacgtcgagagacagatccagacgcaccacagaacgcagacaatcatgaaaatacgtacgcgacggtgaagcgattgcacattttgaaatcgtaacagcgttccggcgggtggttgacgtttatgaattcgcaacattcttctgcgcgtacccgcggcacgcggctgtgacccagtagcaaccacaacgtcgtcaagaacggcgtcaggtctttgggactcatgacgcgcggttttcaaaattccctgcgcgcgcgacgggctcaaacgatgagattgggatgggtgcagaaggtgtaagtctggttattggcctcggtgaacgtcaatcgcacctgaaaagacacgctgtagtcccggaagacgtgggcccagctctccagtttcatcacacacatctgataacgtgtgccatcgttgacgacgaagcgtagcagcttggtctgcttgggcaccatgtgcgctccaaaaatcttggcgtcttccacgctgatctgcacgtttccgtcgctcggtttcgaagccgttcggggcatccgttggaggatggtctggttgcgaccgctcagataccagatcacctttttcacccaggtggagcttttctccaccaaggtctggccttcccggttgtacagcagatacagggtctcgttgcgacactcgggacccgttgatacccgctggaaccccgagaattgcgagggggaccgtgggggcgagggatagagaaaaggacagtaaaacgtcgccgcgtcatgcggtttggaatacgtcagtttagaccatggcggggacggattctggttcgccgttagcgtcgaccacgaagacgccagacagggcgttgcccaaaccgcgcacagaagcaggcagtgaaagtagtgacgaagcagaagccgcagcatattatttcccgtgacgcaggctagttggcaaagagccgcacgctgaactcgaggctccgggcgtgcggcgccagcgaaccggcggcgttgaacgtggtccttttgttggtgccgccgcgacggttctgacgtctaaagtcgctgatgagcaacgacacctcggtcacgttgattctgcaagcacaggttccgaacgtcatttcacaccccatgcggttacctacccgttacccgttcgcccttaccttcccgttgtcatacacctttagcgcgtaccctcacctcttgagcacgtcaaagttgtccaagccgtggctcgcatcgtagtggtagttcaacgtgaggtccacgagctgttccacatacttgtaacgggtttggtcgggcagcgcgcgagagcacgcgtcccagtaatgcggtactcggtaataatcgtttttttctgcggtctcccgctggcactgacccagcaccacggcgcacagacaaacagacagccacacccgatacagccgcatgttgcagactgagaaagagagctttattatgagacatcatacacatagtataggcgaggtaatggggcggggaaagagttggaaccgaaagacaaaaaaaaaagcctagtcgtactcgggatctctgagcgagacggattgcgtagcaactttcattagtttgggaatctgccagctggtgctgttggaaggttcttccatttccgaggcggtcagttcatcgtacaccgagacgtagtacctgatggggtcctcctcattgtccgagaggtgagattcgatggtcaaaggcgagcctctcccataattgggattcacgaacgacgtgtccaagttgccatcctttctgaaatagatgacgttctcaggatcatgtttcatgcgctcgcgggccgcggacgcctcctcctcctcgtcccagtcccgagtttccaaccgctgataagggctcgaggaacaaaatccggcggggatctgagaacctcgtcgggaaccgctgccaaacgggctgctgccgccactatcgtccgtgtcgtccaacaggttgacggcctcttcgtcggcgaaacgaaagcggcccgggtgcttgcaacacgaggagtaaactaccgcgatgagtaccgctatgaagctgaaaatggaggtgcctgtcacaatgtagaagaggatagccagcactttcatgatttcgtcattgcgcgcgtcgtgaacggaagattcgcgggcggtggtcatgttggtttcggttgtaggttcgctactcgtagtgctctcgacggtatttctgctgctggtgctagtagggacgtttgtgctgctggtcatatttgtagcgtcgctgaagtccatgtgaagcagcaacccgaacgcgaccaggaccaggaatgttgcgcgaaggagaccccgcggggccggcattcttgagacgtggcgacgtggatttcttgttatgtccgcgaacgacgtgtgacgaggacgtggtttccgcaagcctctaccgacgccgcgacaccaggtaggttatgaaaacgcgagcccatatcgccgccatcattgtaatcagcaatgtgttgaggtactgcacgatgaatctgtctagtgacaccagccaaccctctgcttttgcgggcaagcgcgctttcggtgacagggtgtatcgtacgtagccgcgggtcaggcgcgcgttgtagcggtacacgcagaaatctatccacaggccaacgcccggctgtagcttcggatggtggataatagcgcggtgacgtacgccgcggggctttagaatctccacctgtaaggccatctcctccaggtagtgggtctgactgcgacgcagcgtccagttcatgtaaaagtcggtctcgccgtgtccggccacgaagaggctgcttactaaatcgggcgccagagctaggtcaggcgtatcaaattccactgccaggcgacctgattctaacggttccacgatccgggagagcgtttctagatatagagcaaagcgtaccacgtctacctgcggtgtaaaaaactgttgtgggcgttcaccgtcgttgaccacgtaggccacgtagaggccaacattttccaccacgggttctagctgcaggcggcacgtaaagcttagaaacgacggctgtacggtttggttcccgtgaagctgaagcgtcacttccttgccggggctcaccgtgctgtaacgtcgcaccgagtcggtcatctgctccagatcggtagaccagaaaggcgtgcaatgcatactgtcccagtcgcgacacacagcccagcctagctcggtgaagggtcgacgcacacccgaaaaagtgtgcttgaagaccagggggtcgcctcggtagctcagtagccgaacatgcacatagtcgcggctagcgttgacagacggcccgtggagggccagtaggacgagcgtgaacagcaagcgcaacatgctgcgcgggttaggaaatgcggcgtgccggccaccgcccgactcataaacgctaccagcatgacgtctcagatcacacaagtgacgaggagcgtaccgcaaatcactagggaaaaggccagcagagcccgatagtcttgctcttcgcgaacgatctcgtccggttcctcgcagtcttcgtggtccacagaagatgaggagcaggattcttcgttaatctctgccaggatactagtgctataccacaccagagcgctcagcgtgcccagggctaccgcacggtaaaatagggacatgatcaccagcgcagtctaaagtagtggtaattaagtttcttggcgtatttccagagaaaggctttgtaggccgtagggactggccaggcaccgaactcaatattggtagacactacgtcgtaaatgcgttgttcctcatctaagattaaccgaaaaaatagccggttgatgtgacggcgcacggcttgcgcgttaggattgagacacttggtgcccttgtcctttaaaatagccagcacttcctgacgattgcagctttcgctcgctgcgattggcttaagcagttgagttccgactggcagggtattcaacagaatttggttgttgcaacggcagcgcctgtcgtaatcttctagttctaaaacatggacggctaggggacatatggtaagtaacatatatgcgattaatgacaggtatcgtaccgataacagattgatatgcgagtttgaaaccggatggtgcaaccatgttagtaccatattaaacacatactgtaatattttgttttaacgaacttgtctgtttgaaaacatacattaaatattatcctctaacacctatcaaggttatatttattcgtctcggttctggtgatttcgttatgttaacattataccacctattatcgttgcgtttgtctaaccattttgagaagaggtgatcgggcgataaacatactccatgtccaggcggcttccttccgtctggatacaataaatgttcatttttatcgcatccgggccctctgggatcgcgatgaagccaataattacccaatataattttattaggcggccattttctatgaagacatctgcagcgtaattctgttccattcacctcataatgatacacatatgctaaaaaaataatcaacgcaccaaaaattaatcgcattataattttattatctacgtcactaccagtaattcgtaatatccggtattcccggaaaatcactcaaaactgcgtccatgacacatcaattcccgataagtacccccctttgaaatcggatccccccacataccaatcaatcacacaacacacaggtttaaaaatcgatcacacgtcaattaggtttcaaaatcgatactgtttattatcaggaatctagactaattctacaatgacagctctgaatttctctcttgtctttcttgtcaggttctcatcatcagtcatcacttccacccatcgaggagtcatcgtcgctccaaaatcctttggggtcgctagttggaaaagtctctgacacgatccaggcaccccgcacccagtccgactgatctagcttgcggagcatctcaacaggcatgagctgcagggccacggctgtcacggcactgtatcgatgtaacactagggactttctttgcgatgtagccatcaacacggcgtatgccccatagttcgcgtgatacgacgcatgatgggttaaacgttcccatccggcagtgccgtctcgggtccgtgcacacaacagctgcacagcgttatgatgcttaaaattaaccataacgctgggactactgatgaaggagtagtaatgagccaggacgccgtacatcgaaggcaacaagaaagagtgacagcacgatagcaccgggctcttatgtaggcgacagcttatttttcctgacgtcggcaaaaagtacctaaattccccacagatattcagacacggttccgtaaagtgcttctttttttagtgcaggaattggaaaaaataataaaaaatatgaacagctcatctgtaattatctgtgtgacttcatcgtaccgtgatgtaaaaacaacaacaggaagcttacagggtgcggtagaaaaatttgccgattgtgcaacactgttggcatctctcactccgataggcggctataagatagagaattaaaagtatgatacccacaagaaagatgaagagggacaaccaggctagagtatgacgaccgcttttcctttgtttgacggttacatgtgcggtatgattttgctgtcgttgcttgtgatgttggacacctggagtggaaaacgacgtatgattcttagatgcgcatatggtgttattagtggaagtgcagttacgaaccgtgatctgagtgtcgttacattgagtacaattagtacagttgtaaagccctgtgagataagtaccgtttgggcacagtgtacacgttatgccactattctctgtacacacttttgtaactttttgtcctgatccgcatggcgggcaacattgattacccagcttcacctcatcgggcttacacattttacttcccccaagctgtagtaaaaacataccgaagcagatgagcatcaccagaggcttcatgcctcctaccggaagaataaaaataactcatagggccgaacggtgtcatcctctccgcggtttgtaatacgagattgcaaacgtaaataaatgacataacttcactaacacgcatactacaaagtccacctacgacgctgaaagttcttccaggacagaacaggatagtcagccatcttcacagtctacctcttaggccgtatccaggagcataggtaatcagtttccagccacagtacagcgagcccaggaaaccgcacacggtccctgccgggaacacgtaccaccacatcgattcgtcgtgccgtagaaccgtagagttttccgaacttttatacacgccggtggcgttagggccgtgtgtgctgctgtgattggaggttttgtgagctaggtaacagctgtgatttcacctgtcgccaacactgacagcgattacccaggtggagcacaatcacatagctgatggacgttggttgatccgttgattcccatggacattttaacggcgacagtacagctcccgttaaacattagaataatagacgttagtggataacagcatgttattcgcccaagtgtgatcgtggttatacactttcttgttttttgctcatatgctgtaaggtgttcgaggatcgtggggagtatatgtgttgaatcggaatcatgtttactgaccgcgccatacttcgtatacgaacctaaccggcgtaaagtgttttccgatatataaactggcgcctattgtggctgtagcgcccataggtatggcgtatacccacggtgatgttgtgttattcgttttttgtgataaaacgtagcttatgtttaacgtgtgttccgtcacgttatgtgtgtcgttaaaagacggcgcctgtacagtatggctttgagttgtatcttgaattgttattgcatctggaggtgttgtgtacagagtggttgttgcgtgttgaggtgttgttacgttttgaggcacagttgcggtgtacacgggctccaaggtgtagttacggagtctttctatgcaggtagtgttgagatatttttgaatgctggttatgttcgattctgtgaggttaaagtgtgtactatttatgacggtgtaatttagacggtcttgccatcccgaggatattagtgttaggtaattcgtgttgttcacgtttgcttgatatgtataggtaggtgtactgtttgtgaggtcgcaagtgtgattttcttgcagagattttatccatcttgtgtgaaaatattgagatacgcgatgaatgttttcgctatctatattataaagcgtttcagtgtcacctaggggttgtttgttgtaacttttattttggaccctgggtgtgaaccatgattccaatgtttgtatagtaaggtgtcctactaataaagacgaactgattcctaccgtaatgttataccgcacacccagggtgccgtttacaaacacggaaatgtttccgttacaaaccacgttggcagatgaattagattccaggtggtaacgataggataatgaccgttcgctcccaacggatgacacaaagtatccgaataaccaacacgcccattcaatccgcatattttaatcacactattcacacctcacacactgcattttttaacatcttatttttttattttatgcgtgttctcacctcttcatctttttaacaccggggtaactatcgtaagtcggtaggcgtcgatagccctcaccacctcgtcgtccccttcccggcgtggggcaccagcgtccacagcactgcaggtaacacaggtagcataggaaacatacggtgaaaatactccaaaatcccaaaaatgccgcgattccccgagtggcccagggagacatcccggtgtctatgtcggccggcggtgctggcgtcaccggtaaaaatttcggcgggtgtggctgcgaacggtagcagtcgccggggagccggtaacgctgtatcactgtccaacagcggtcgggttcctcgtccggacatgcgggtttccagcaatcctcggcgtcggcgcgtccgatatagaagtagttgcgctgaaaaccgcggtacatcccgcagtcgtgattccgtagacgccagggcgtcggcgaccagatctggtctcccagcgagtagcgacctaacgccggcgtgcagcaaggttcgtcgggccggctgagcgtctccagttgcgtgagaattacgaagcgttgcatgatgaggccgtggctgtagttgcgcagcacgcattcgtacatgccggccgtgtccgtcgatacgttgaaagtcagcgagaatatttggccgagatgcaattgcgagaaattccaagtggcgtacggcaggcggtactggagtccgttcatcagccgatggcctttgacggcgtccaggatgagctcgtcgctgccgtcgtgggaacgacagaaacgtgcgcgaatggagaccatgggccaggagtgtgtcatgaccgtgcaggggatggtaacttgctctccctcggcgaccaacaccggcgccggcgacgtggtctcataattctcggcccacatcttttcggcaatgtcagcggtggcgaaggggaacgaagaggaagaatattcgaggagtcgcgggcagctcaacagcacccagaacagccacggcagagttcggagcgactcccggcggcacatgatgattctttccttccctttttcgcagagacgctgcgcgcctgctcctgctccgtgtgtcggccgctcaaacgtcgggccggcgtggtggtgaccaccgtgcgacgcagcttctcgcccgggatgcccgcgactgagcgtccggtttttttgcaggtcttttttgctgcctcctcctcgccgtcgccgtcgcggccgacgtggtggaccagcaccgcgcaggaactctcgcgtcgccggcggtacgcgacctgtctcattgctacctcggatgtttaagaaggaacgttcatctgcgtcacagggtctgatgaagctgccaagagtcgtggctgtggcgcagcgcgttctgtacggcgcgtttcaccgctttctgcatggccgctaccacgtcgggcgggagcggctccggcggaagctcgatgagcagttgctgcgagtctcggcgctcggcgtccgccgtttcgtcggacgtggcgtagaaaaccgaggtggtcgcccagtcgtccacgctgtcgacggcctctgtcagtgccgggttgtcaaaaccgccatcggacgcgggtgataaaagaacgtacgatgacacgctgttagtacgattctcgtcgtcgctctgggaacgacgtgatggacgacggtagatgacctcgtcttgccacgcgtcgaagcgatcgcagcagcgctggatccaagcgcagcgaagcagcttacggaacacgtcgttgttccaaaagtagagcataaagagaaagaaaagtagcgtaacgatgaagccgaaaacgacgagggtcggcagggcactaccgccgctgccgttttttgtgtcgtgcgggtgcacggtggtagtggcgttagtctgagctggggtcatgacaagtctgaagagatgagagcgtgggtgctcatcagggacagttgaggtctctccctaccgaagccttagcctctacggtgttttatgatcaacgtgtctacgaacgtcattgtgaaagtgacgtctcaggctttccgaaaccgcgtcagattcaacgtgggtttcggtttagcctgcgtcaccgaggcggaggtggaaatgagccgtcctgtgggggagtgtacgaccctgtagtgcccatgggtaacgtcgcgtcggaagaagtgaatgcggcattggtgtacgcgtgggttgttttgctctctgactcggaggagttgccgcagcagctgcagattttacgtactagccaaaagcagcaaaagcagcaggtaaataagagaaggagtccagataatgtccagccgctagcggcaaacagcgcaagttgcgcgactgtccaattactaccaccaaaactctcaacacattgaatcgacgctgaggttggtgttgcagtgctgttgctactagtggatgaagacgaagtagattgactggaattagagctggtacctgtagtggtttcacttgccgatgcggcaagtgcaaataaaactaatatccacagcatgttcgttactatataattgatatacgaacccgtttgtcgtaacaatcagcgttatatacgctgtatcggcatcgttttaccggaaagtttatcgtaatgtaacccgcgttgtgtacattcgtactgaaagggaacccccggtgatgtgcacattatactctttcattctggggtttcccaatgacgtaaaaatttccactatacaataaaattacggaatcatgtgaaaagtgtgctttttattaacagagcagagggtttacagtagatatatgtttgccagggccactgttttctaacaccgatcaccgccaccattaccacccgttgaactccacacccgggagccgcctgatcgccagggactcctcaccgtccatcgtccgaacaagctcccgccaccgatgctgccaccatcaccgagagaaagaaccgcttgctgcagatacgcttgggctcgcctccgtgcggacgccgtttcgtgcagacgctgagtagatcgagcagagaatgtcaaaacgacattaccgcgatccgctcccctcttttttctttttctcattcacgtgtattcttgatgataatgtaccatggctacggtggtgaactgcgtcgcggatcccgtcacgggtttcaacagatcgacgtcggtcagcggcgccgtcaccgccatgtccggcggaggcacgctgtttctctggttagcgacgtggaccgacgacgaagacgatgaacccgcgcggcggtctgttatccgcgacgacgcgtagctgcactgggaagacacttcctcccaacggaccaagatctcatcgggccgttcggagaaacggtatcgtctgtccgactcccgccgtacggcgccgaggcccagcgacgacaggtccgcgaaccggcgctcgtattccccgtacagctcgcaacagcggatcagccagcggtagctcaaaaacatgcgcaccagtttgaaggtgtcgtgccaatggtaagctagatagcagagaatggccacgatcagcacgagcatcacgccgatgatgggtaacccgacgttcagcggcagatcgtccatggtgaccgtcctctgtccggatctacgtcccagtctctctcttttgtacagcactcgcgcgggaacggccccctcaaccctcttacgtagcgggagatacggcgttctcccgcgggccacttacttgcacggtcgcttgaacggcggcttggactgccacatgcaccgcatccatccatttcggcagcagcgcgttcgacgatgtcgtacgagtcgcggatgatgttaccccgccagcacctccgccggcaaccgcgtcgtcgttgctatcgtcgccggtttcgggcgatgacagcgccggcggcgcgggtctcgtctcgtccaccatttccaccgtgtcgaagcgacagccgctgccgtagtacatagctccgttcaacggccggcgggccgggtcgccgagttccgggtcgggcacatccatggctcgccgtctccttctttgccgctcgtggtgccgacggcacttctcgggataatgacagccgcaaaatagatcgtggagcatgtctcgccaactgtcctggtgataatatcttaagtacgcgatgagcgcgccgatggccataatcataagcgtaagcaaaacggcacagataacgtgaaacaccgcggtcatccaagtcgggcggcgtcggggacgcggtgggtcggtttctcttacgccggcgtcactcagccaccacacccgtagccgacattcccagaatcggtgaatgcgactcaaggcctttcgacgccgccatttatttccaacgtccaagtcccacgtcatttctggcatctccacgcccttgactgacatactctctttctctctcttagctgcggtgaaaaagagggaaggcgtgtgctgctatacaactgtacaacggacgcgctcgctctttcggtctcaggtcatctgcatcgactcggcgtccttcatgacgctctgcaccgccttttccaacagttcctcgatgtccgaccatcgaggaggcggggctaactcggaaaccgacacgataggcagcgtggtcggctccgttggtgtgcggggtcggggacagggacacgagagtcccaccttcgagagattctccagcccgacggtgcgcggcagtctcggattccgcggcggcttttgcggcgtcggcgttttcgggaagggcctgggcgtcaccggcggtgtccagccgaccggcttgggtttcgtgggcggcggtgttttcttggtgagcggcgtgctcaggttcttacgcggcgcgggtatcggcgtcgggggcctgtgcgacgacagccgcgtggtgggggcccggaccggcggcgtaggcggccgcttcttgcgcccgggcggcggaggtggcttccaggatggtggcggctgatgcagcaccgtgtcgacgctggtcgaggacgacaaagagctcgacgaggaacaatgcgacggagatcggccgatgctggttggcgttcccggagtggatacgtcggggatctcgaaccgcgccggaggaaactcgggtttatctatcggcagaccatcctctcctatgtagagcgacgtacaccgcggcacctgcggcgtcggcgggtgggtggccacccgcatgagccccagttccagatccagcggctcgacgacgtcttctttcggattgcgatagcagcacgcgcaggcaccacgcttatcagaagcagcacccgggagccggcctcgcgacgaagtctcgtcggatcgcttgcggcctcggcgctgggtaaataaggaaatggccaggaccagggaagccagtccggtaccgccgaggagcccgacgccgagccacagccacaccatgatcttctctcctgcttggaatctcaaactccgtgtcgggaagggccggtgtacggacatttatgccttggatttctggaaacgtcattttttggcaaggaatgtgtttattgtccaaacactgaggaaggagatgtgggccaagtcggaaaattccttatcacaccgggggcgggttacgttccggtctgatgctgctgctgttgttgtagagccgcggccacggccgtctgcacggcagcttgtaccgcctcggccacgccgggtggcatctgcggcatggcggggggaggcgcgtcgggcggaccgccgggcatcgccgtcggctgtgacggtggttgtgaactcaccgtcggctcgcacggaggtttgttcttcggtctacccctcggtttgtctttcgccctacctttcttcggtttgggttccgatgtcggtgttggcggctgcggtgggatgacgggctggtgggactcctccgacggcggggggacgaacaccgtcggcgccgaaaccgggggactctcgactatctcgcagatcaccctgtcaggatcgtcgccgtgcccgggacgccgtcgatgaccgtattggaccatgtcgtaaatcatcgtctccttgtaacacgctgaacagcagcggctgcaggggcccgagatgcatttacagctgcacttacagctgcagctgcagtagcgcacccatcggcaagttaaaatgtcgattatggaatctttgaaaaattcccggtagcggatgaggtacgcgcagaggaaaatcatgaaaacggaacagacgaccacagccgcgatgccaggtccagaaaaaatattcgctgatgaacccgccaaacaccaaattcccaaggccgcgcatatcatccagatcacaatgatcgcggggacgccccattggcattggcacgaaggatcttgcacatcgcaacccatcgctactgcgttctcccacaaacgccatcgcactatttatccctacagcggctgccgagtcacgtccgccggcgcccatcggccgcggcgatctcctagtaacactcgtccgacacttccaccatctccagctcggccggcggttcggcatcctccaccagcggcgtcgtctcatctttgccgcagcagcggacgcacaccttctccaggcagaacgccaccagctgccgccgaacgtaccacaggtacacgtgcagacctgcgaacaggactacggaggtcatgaccaccacgacgcacacgggaatccaaggatcgagattgtcgctggaactcatggctatcgccaccgacgtgcccgcgtctgtctcaccgccgctcgcccgatgtcgcacggcttgttatacgctagcccgtcgccgcctcggggcacggtgccctcctacccacgtaacttcctccgtgacttaaagtcgcgtgtggtagatctcctgctccgtggacgaaccgttcggcaggatagcggttaaggattcggtgctaaggccgtgtcgccaacgtcgaatgctacgttgcaatagcttcgacggacggccatcctccctctcatcgcaataataaaacaccagcagcgcacacgacgcgatcacggtgacccccatgactagacccacgcagatagccagccccgctagcgtatccagcgccatcccgttcgctcccgtcgtcgtctcctgaacaaagcaactccgcagtccccgttttcaaccgttttcaaccgtttttgtttccttctccgcgactagatgttaacgcccgcggtctttccggccgtgctctacctcctggcgcttgtcgtctgggttgagatgttctgcctcgtcgccgtagccgtcgtcgagcgcgagatcgcctgggcgctgctgctgcggatgctggtcgttggcttgatggtggaagtcggcgccgccgccgcttggaccttcgtgcgttgcctcgcctaccagcgctcctttcccgtgcttacagccttcccctgaaacccgcgtcaatcgactgtcccgaaaacgccggcgttaacacaggaaaaaaaaaccacgcaggaaccgcgtaggaaccacgcggaacatgggacactatctggaaatcctgttgaacgtcatcgtcttcactctgctgctcggcgtcatggtcagcatcgccgcctggtacttcacgtgaaccaccgtcgtcccggtttaaaaaccatcatcgacggccgttataaagccacccggacacgtgccgcggcacttgcctacggcgctgctccagggaaactcctcttccttctgctcttcctccttcaccgcagggaccgtctccctcgaccagggacccgccgaagcaaccgccggaacaacctggaggaggcgcggcatgacggcacccaagtgtgttacgaccactacttatctggtcaagaccaaggaacagccctggtggcccgacaacgccatcaggagatggtggatcagcgttgccatcgtcatcttcatcggagtctgtctggtggccctgatgtactttacgcagcagcaggcacgcaacgggagcggcagcggctagataagtctctggcggctacagctccaagcgccgtagccggcccgcctgccgatcgcgacgtcgtggaccatcgaacagagactcacgcgtacgagaccccgaggtacgccacgcggtgcctaacgcggtataccacacccgtacggtctgcagtgcggcgtacaacgtgtggaaaacgcgttgcgtcgcagagtcagccacgtccccgtcttgtcgctccccaatcggctcccgcacaccccccgcggcacccagagggcgggtgagccaagtattcttaaggccgttctctgttccatatcccataaattgtttattccggagctcgttggcgcggaaatagccggataaggggagcaacaaccgtcggcgaaagccgtcccgctcattcagtccgggtttcgcgtctagtcggaggtgtgaccgttggccaacggaacggcgtttcacgatcaaaatcgtatcgggtagtgtaggagacgtcggcggtgcagaatgcgactcgcggcgtagctcgccgtcgctatgcggctcgtcgccgtgtggcgcggcctggccggctgtctgcgcccagatctgttggccttttgggtcctctggctgctgctgcgtgtgtgctttggcagacgcggtggcaatttgcggtctgcggtaagtgaggatatcgccgagcaagcgcatttgcggcacgtgggcggcacgcgtgttattgttcgttcgttgccagatagcaagtgctgtcgacagcagacgttgtgggcggttggtgtatttttgcgggttgcggtgaaagtcggcagccggcgtcttgtgaagtatcttaaccatctgtgttgctttttgcagcgtccagaaaagcgacgcgactttggggatggcctcgtgctcaccttcgcggagagcgccgccggacctgctcgtcagcagcgagctacgcagacggaatatctggaggagagttacgtgtgtcacaggggagcgcgggtctccggcggtaacgacggcggtatcgtcgacacgtgtgcggcctgctgtgctctgcggaaaagcgccggtctcggagaccgtggacgaaaaagagaacgcagcagctaccgctggcggcggcgtcgttaatgctgccgttgatgatcgacgttgtgagtactcggaaacagcggtgaggcagaagctcggttctccagggaacgaccgtcgatgcgtggtaggcgcagcaggtgaggttggggcggacaacgtgttgcggatcgtggcgagaacgtcgtcctccccttcttcaccgccccacccaccctcggttggtgtttctttttccttgtgttctgcagatagttccacggacagcgacggcaagtccataagcaccggtgtgcaagtggtggagcacgacgaagatatcaccgcgccgcagagtttgtggtgcacggcgttcaaggaagccctgtgggatgtggccctgctggaagtgccgcgttgggtgtggcagggctggaagaggtggcgcaacagcgagtccgggcgtcgatggagtgctgggtctgcgtcggcttccagcttgtctgacttggcgggcgaggccgtgggagaattggtgggctcgctcgtcgcgtacgtcatcctcgaacggctgtggttggcggcccgaggctgggtgtgcgaaacgggtgtgcaagccgaggaggccatggcgcgacggcgacagcgcatgctgtggcggatgttctctcgtggaggcgacggcgaatgcagcacacggtgtgcgatggagatggcgtgcgaggaagaaagcgccgtgttgtgagccgacggcgcgggacgcgggccggcgcagcgcgtgggccacgtgtggtggcaggcggcgtcgtccgcttgcggccgtcgccgcgccgcacagacgcaaacacatgtcgccgtcaagagaaacagtctgagcatagccgtctgcagcggtccgcgtgtagaagcggggggagaacgacgttaataaagaatagcggcggtgccgatagggcgaccgctgaagcgagctgcgtgtgcgtgcctgttttgttccccgtcgccgccgaaaagctacgcgcggcccccgtccctagccttgagcgcgccacagcacgccgcaaactcggcgtcgcgcttacgtcccgcaaacccccctcagcctcgtcccgccaaccaataccgtggcacgcagtgccatagcgccgcgcgtcaaggcgcttacacccccctcagcccggtcccgcaccggcgtcggtctgggtgtggcgggggtgcggctgggtgggtgtgtgccgggtgcggctgggtgtggcgggtgtgtcgcgggtgtgtcggctggctgtgtggcgggcgcgtgccgggtgtgtcgcgggcgtgtgccgggtgtgtcgcgggtgtgtcaggggtgtgtcggcggggtgtgcgcgcggccagatggaagcagtgtgccccggggcccgcgatccccccccccgccccggcgcgggcgcttcttctgcgtgtgtcctcgacgcgggtctgtgcgcctgcctgccggtcccggcagactgggctgcggcttcctcgttttttttttccgcctgtggccgtccccggggacttcctcttttccgcgtccgatcttcgcgtccccagggagtcgcgccgccgtcccctcgggaccgcttcctcttttccccggggactcaaagacacgcaagacagacgcgcgactgaaagagacgcaagacacacgcgcgtctgggtttcgccgtgcgcgccgcacggcgcttttattcgccgtcgccgtcccccgccaccgccaacttcccaaattcccacatttcacccccccgatgaaaacacccccccgcccctcggggacccagcacacggcccggaatggaggtcaggcgtccacctaggtgtgcgcgcgctcggcggcccgttgttggtggcttgtcgcgcatcttctttcggttttttcacggccttccagactgcgcggcggcaaggcggcgccagcaagcgccgtgcacgtcgctgcctataaaagccaggtgcgtgtcgcccgcggcacacgggcgacggaggcgtccgcgtgtgtaaacggcgtggtcgctgacgcgggtttgcttcctatatatacagagtggacgtcggaggcgtccggcggccatggcccagcgcaacggcatgtcgccgcgccccccgcccctcggtcgcggccgcggagccggagggccttcgggggttggttcctctcgttcttcttctttggaagcgacgtcaacagcggggactagtacgagtactgcgggtacggcgacgccggcccacgccgtccaccgggtagaaccccgcgggccgccgggcgcccctccgggtagcggcaacaacagcaccttttggcacggcccggagcgcttgctgctgtctcagattccggtggagcgccaggcgctgacggagctggaataccaggccatgggcgccgtgtggcgcgccgcgtttttggccaacagcacgggccgcgccatgcgcaagtggtcgcagcgcgacgcgggcacgctgctgccgctcggacggccgtacggattctacgcgcgagtgacgccgcgcagccagatgaacggcgtgggcgccacggacctgcgtcagctgtcgccgcgggacgcgtggatcgtgctggtggcgaccgtggtgcacgaggtggaccccgcggccgacccgacggtgggcgacaaggccggccatcccgagggtctgtgcgcgcaggacggactgtacctggcgctgggcgccgggttccgcgtgttcgtgtacgacctggcgaacaacacgctgatcctggcggcgcgcgacgcggacgagtggtttcggcacggcgcgggcgaggtggtgcgcctgtaccgctgcaaccggctgggcgtgggcaccccgcgcgcgacgctgctgcctcagccggcgcttcgccagacgttgctgcgcgccgaggaggcgacggcgctcggacgggagctgcgccggcggtgggccggcacgacggtggcgctgcagacgccgggcaggcgactgcagccgatggtgctgctgggcgcgtggcaggagctggcgcagtacgagccgttcgcgtcggcgccgcaccccgcgtcgctgctgacggccgtgcgtcggcacctgaaccagcgtctgtgctgcggctggctggcgctgggcgcggtgctgccgtcgcggtggctgcgctgcgcggcagggccggcgacagggacgacggcggggacgacgacgacgatgacggcggggacgacggcgatggcgacggggacgacgttgctgccgggggcgagcggcacggagacggaggccgccggcggggacgcgccgtgcgcgatggcgggagccgtggggtctgctgtgactttacctccgcagccgtacggcgccgccggcgggagcgcgatttgcgtgccaaacgcggacgcgcacgcggtggtcggaacggatgcggcagcggcagcagcggcggcgccgacggtgatggtgggtccgacggcgatggcgggtccggcggcgtcggggaccgtgccgcgcgccatgctggtggtggtgctggacgagctgggcgccgtgttcgggtactgcccgctggacgggcacgtgtacccgctggcggcggagctgtcgcactttctgcgcgcgggcgtgttgggcgcgctggcgctggggcgcgagtcggcgcccgccgccgaggccgcgcggcggctgctgcccgagctggaccgcgagcagtgggagcggccgcgctgggacgcgctgcacctgcacccgcgcgccgcgctgtgggcgcgcgagccgcacgggcagtgggagttcatgtttcgcgaacaacgcggtgaccccataaatgatcccgtcgcatttcgtctttcggacgctcgaactctcggtctcgacctcaccaccgtcatgacagagcgtcaaagtcaattgcccgaaaagtatatcggtttctatcagattaggaaacctccttggctcatggaacaacctccacccccatctcgccaaaccaaaccggacgctgcaactctgcccccaccgctcagtgctcaggcaagcgtcagccacgcactccgatacgatgacgagttgtggcgcccgctcagtacagttcacgaccacaaagcctggttggatctcgacgaatcacactgggtcctcggagacagccgacccgacgatataaggcaacgcagactgctgaaggccactcaacgacgaggcgccgaaatcgacagacccatgcctgtcgtgcccgaagaatgttacgaccaacggttcactaccgaaggccaccaggtcatcccgttgtgcgcgtccgaacccgaggatgacgacgaagatcctacctacgacgaattgccgtcgcgcccaccccagaaacataagccgccagacaaacctccgcgcttatgcaaaactggccccggcccacctccgctgccgccaaagcaacggcacggttccaccgacggaaaagtttctgcgccccgacagtcggagcatcataaaagacagacccgaccgccaaggccgccaccgcccaaattcggggatagaaccgcggcccatctctcgcaaaatatgcgagacatgtacctcgatatgtgtacatcttcggcccacaggccacggccgccagcacctccgcggccgaaaaaatgtcaaacacacgcccctcaccacgttcatcattgaaagtctctccagtccatatgttgtcaggacgtgctgtcgttctccgcttgctgcgaagcccgttcttccgagtcgtgtcgctgcgtccagcgtcgcgcccaagatgggaatttgggtctcttcacgcgtagcctcctccaccacggctgctgatcgccgtcactaaggaccgacacggaggatgacgaggagcttctccccgactccgcggtccgcgaccggctacgtagcgcgtgtccctgccagtctccgcagttacaccacacgtcgtgagcagcgtgcacctgctgccgccactgggcctcggcgtgctcgggccacccgccggagcccggtctgagctccgacgcaggatgcgcgtactcaacgtgcgccttccagtccatacagcaacaccataggtcgtgcgagtcgtcggctacccgccgccaggccagttcccgcatgggaaggctggacacgccgaccgagaggtcaccgagcccggacgccatctcttcttcctctccgtcgctgtcattaagcagccaggtcacctcctccgctccgcggtccgccggtctcgacggaccgcgccgccgtcggcaacacggaaaacagtacgccagcccgagccgctaaggccgcatgcccctgccgcccaactgaacacgcatatcccgctcaactgcgttttgccacccctgccagtgctcccgctcgagcaccaccccgcatctcccaacctttttccaataaacgaaaccgacatgacacacgtaatgggtactcgtggctagatttattgaaataaaccgcgatcccgggcgtctcagcacacgaaaaaccgcatccacatcatagacaagttacagtccacagtcacatacacgataaacaataccaacagggtaatgtttatggagtaaaacactattgtccaggccacatgcgtgtatgacttccgcaccatcccgtactgcatgttccacatgtacgcgctagacgtgtaatctactcgcagttcggggacgcaacgcagccagatcacatccccttgcagtattaattaagggccggccgcatcagcttgatatcgaattcctgcagatctgctag

SEQ ID NO: 8 - DNA, 229209 bp, Human cytomegalovirus
gaagctaggcgcgcctgtttaaacatggatccggccgcccttaattaacgtgggagtctgatccaacactgaacgctttcgtcgtgtttttcatgcagcttttacagaccatgacaagcctgacgagagcgttcatcggggcatgaagtacgcattacacaaactccatatatttgttacgatagaatacggaacggaggaggctttcgccacacctatcctgaaagcgttgcattctttatgataggtgtgacgatgtctttaccattcccacggctgctttgcgtgatgatgacattcatcatgtatttccattcacacataccttttgtgcatacggtttatatatgaccatccacgcttataacgaacctaacagtttattagcccttgacaggataggtcaaaagattatatgtaggttttccggtaaaccgaattgtgatatttctctgcaggaaatagaacagcctggtacctataaaacggacaatgcagtactgtagcagcgtaaccaagtaggtccacatgaacacgtacaaaattatggtaagccatcgtttttcataccacagcctgtagctgtcgtacatgaatgaggacggtcgaggaacccagggtagttgtaattgggggcgacattcgtactgtccagaagacaattgcacgggtttcagtgagatgagtactttagcgatgtcggcgggggcgctacgtttcaccgtgacggtgagaacttgaccgtcgttttgtatttcatgaggcacgttatacaagccactggtatcatgaaggatgacctctgatgcgatgtgaggattaaattgtccctcaaaccgccaaacgctggtcatgtttccaccgtcaattacgcagctgacggtgtgagataccacgatgttggacttaggtttgggggctaattgcctttttacaaattcccttctgtattgcaggtcctgctgccactgcttttccgtgcggaaagtcgccatgtcttccacacgtgtggcgacgatagacgccaccaaggtagctaccagaagcagctggatccgcatggcattaccgtatgtcaattagaaagttgagcggacacggttatcgttcctggcggatataagtatataaacgcgagttagcctttcccgtccgttttgtacacccgttccccacacaaatgacgaatacgacctttttttttataaaaataaaccacgtgtattatataaaaacatttacatagaaaagagacacacggatcaacataaggacttttcacacttttggggtacacaggcgtgccaccgcagatagtaagcgctggatacacggtacacagtcctggccagcacgtatcccaacagcagcaccatcgccatctgtatggcgatcacgaccccgagctctaagtgtctgtattcatagtgtagtcgtcgcaggttatccactgaattcccgtaactgaaataacgtatatggtaccgaggctggcaccacatgggtttgcatttggtgcacggcaccaaatgcagagtgagatggtccaagtccgtgggcacccactggcgcaaacggaatacggcttcggtggtctccacgaggcactccggggcgtgcagacggccccactttcgtccgtgacggcccgaccagccgacccgagccactatccctttctcgggatagaacgtaccctgtacacgccacacagcgtccaacacgccgtccttgacgacgcagctggcctgatagctggacacgttgttaagcggcggaaagcgaaactgacgtgccggcggagccacatagttcggttcaccgtgttgtcgcggttcgtcctccctatagtaatagtagtcgtcctcataggggttgccggcgtgagccagcgttacccaacagcagcccaggccgacgaggaggcgcagccaccgcctcatggcggcttcgccagtcaatcgtctttagcctcttcttcccgtgaggtccttccggtggcgcggtgccgacctcggacccagggacgtatccacctcaggtacacacagcaggctacctggacaccgaagctgaacaaggctacgtgtttcacaaactgcaccagtaccacatagaggaatgtcaggtagcgtctctccgcaaacagccgttccaagtctgagggcgttacccgcagcggcaaccagggcagcctggacgccggccggcaatggagcacgctccggttacaggcactgcaggggtaaacggttaacatcacgtaagagagtcgtgcgtccacctgtgggagctcagtttcgtaacgtagagccccgtcattttccagctggggtgcgccgaccttgaaatgggtcgcgctccgctcgttaccccaggtgccgtaggctctcggggccgtatcggagaagttgccacgcacaagccaggcggccacgagtaccccgtgctggacgtaacattcggacacggaactggagacacggtagccggacacgtccccaaacccgcgagggtactggggcagacggacggacttgctatttgacaacggacagatacgagacgacgaggacgcagacgactcgtcgctggaccacgacaaccggagcgactccttggagcggctcgagagtacacttactgcgatcagacaccagtgccagaagaaggaacaggtggacggggaccacaggatcatagccgccggcaccgcggccggccgcaggaagccgcccggcgcgtcgtctgtgtgcgggagccgaaacaccgtgcctctttatatcgtcccgacgtgacgcgagtattacgtgtcaggggaaacccccgtcacgacgaacgtgatttgtaagtgacgcggggtgctgacggggttcggcccgagaggtgacggagcgcctcacgtcagtatgatgtccgatccgcgtcagccccgacgtggttgtggtcaccgaaacccacgtttatatggacgttgagagcagcgcctgaccacatgattcatcataccatttctcggaatcgggcccatgccgggaaagcacattccttttcagtaaacaacaatgacatcataacaaatcattttattcgcgaggtggataataaccgcatatcaggaggagggatcgggtgatgacgcaggccccgcagaacagtccgaaataaatttttagtattgccccatagtcgcctagataccagaggtacgtcaagttcatcaaaacgcccatcggcgtcccggaatcgtataccgggcacacgaagcgttcataacaatcccgggaggcgagtgttagggtagcagagtagtttcggggtcggtttccttccggcgacgacagttccgtgggcagcagaatgtacagcgcctcggtagctgtcgcggtgccttccacgaggatgggctgccggtgcctttcgtgattttccccgtcgtgtagccaagccgaggcccgcaaagtcttaggcgaggggaattgtccatagagtttcaccgcacccttcagtacatggttctgaataacacagccgcacgtgaagtaggtaggttctctcgtctcctccgtggctgccgccaccactcccagccaccacaacaggcagatcgccagagggttccggaggcttccccggcgtagcatggttttgggttaaagcaaaaagtctggtgagtcgtttccgagcgactcgagatgcactccgcttcagtctatatatcaccactggtccgaaaacatccagggaaaatgtcggtgcagccaacctttcacatacagcccccaaaacacttgaatcactgccaccatcatcagcgtatactgcgccgacttaatcgtgagcgcgtagtacgccattagacggcgatcttcgaacaatagtcgttcgatgtcctctaacgagctccacaggggaacccaaggcacgaggcaccggggttcgcactctacataataagtttggcattggtggcagggggaaaagtagaacaacacgagttttgtgcgttgggggacacgatagtcccggagccagtaacgttttgcgacgaggctttcggagacgtcctccaccggcgtcggcactcgatccgcgtagccctccagcgtctggtagtacacccggggtgtcggcgtgggcacggacaggttcccgcgcagggtccacagagcctccaatcgaccgcccgatcggagcacgcagcgcgcctcggaatactctactcggtactccgaaacatcgggcagaggcggtaacggctccgtctccaccaagggcggaggttcatcgaaaagagtcaaggataattcaggcatactacccgcgaccggggcccagagggctagaataagcattacaagattcattctgtcttacaagggaaggctgttcccctgtctagactcaaaagctgtaaggctgtcttatagcatgtagtcttgcacgtcatggggaacagggtggtgatctagtgacgtcgggagaacacggtgttttagggtgcgggggacaaaggacagtacgacagattaggtgatagaaacgttttttttttatttatgaaaaagccagtgtgccgtgcggcctagggccccggcgtagtttggataccagatgggggccgtcaggggtactaccacgagcagaaacataatgacttggtccatgtatagcagcatagcggtgcgcagcaggtcgccgtccgtgtagcaatttgacggtgagcgataaagcaccgttaatgtgtcgcggataagcacgatcttgaggccgtagatgaagctcacagtcagtgctaaaatgatgcgttggtatggttcccaggactgcacggcgatgaagagccagagtatgggaagcatgaagcttagcaaacagaggatggctaaccgtcgttgcatgttccaggccataagccaggctaggcccgtacaccagacgcagagcatggatgacaggacataggcctggattaccacggtgcgatcgaaacacagcccgatggtggacacggatatcgtagtgagggtggtatataccatgaccagcatcagggtcccgggtcggcgccgacgttccagccagtacgcgtggcaacgcagagcgcagggtagcagtgtgctccagaagggcagtgtatcgcgcaggtagggggttgtcacgcgccacggtatgagcatgaaaaggatggtagtggctatggtggcgctggtctggaacacgacggtgccgtagagacgtaccatccagagaaagtgttgaacgctccgcagggtgtcttcatctttggtgattacggtgactcgacggatcggcggtggtgacggtggcgacacgggtgggggtttctctttcttatggccgagtggctcgccttggtgaaactggatctgtaccatgacgggtgctcgacgaacagtcgtcggggcttcaggtacccggcaagttttatagagaaagggggacgatgggtggtggctacgagccaccgccaccttcgcaatacgaggatctgaaggcggcaaagacggtcgtccagggcaggcgccagaggttgggactgagcacgatcagcgtgattttaaacatggtcaccagtcctacgtagattagcagcgagccgcgtaacgtctgagcagccggcagttcgtcgcggatgtaacgcgtgccgtagaaagtcacggtcatcataaggaagacgatggcgccgtagccgtagagtagaatacgctgatgatggaacacggtctggtcgccgataacccagagcgtgatgaaaaaaacgctggtgagcacccgtgagcatatgagctcccaacgcttagcgcgaaagctgtccccaaccatgacagcgccggtgcaagctatccacagcgtgaggaccagtgtgtagtcgatgaggatggcgggcaggtcggagcaccaggtgtagaaaaccgtggtaacggagaggaggcctacgtagcccatggtcaataccacgtcgtcggggtgcctttcgccctgtatcaagaccaaacaccagagaagggagggggcaaaaaccagcagcagaggggaagattcatgttgacatatgttgtgggaatcggggatacccagccaaatcattccgcagaaagccgtactgatggcgatgtgaaagaccactagggcgtagacccggacgaggacagcaaaacggcgcagccacataaggccgtggtgcagctgcaggagggaagcccattgcggcgaatgtagcgacggtagcggcgagtccatgaggcgggtgatgcgcccgagtgaacgggtgagcgtctcggtggagtcttcttataaaccagcggagctcaggcagccttgctctggaacgtcgcagtggtggtgttgaggatgacgctgagcgtgccgttgtcaatcaggtaatgatgataggtgccgagcttggccaggtagctgaacatttggtcccagcgtgccgaccacaccacgggcgtgagcatcaggagtgtggtgtgatagattagtgtttcggtggcgtaaagtatcagggagctgcggatgacgtggctcacgggcattttggtggcgatgtagcgcacgtcttggaaaaggacggccaggatgcagcccacgaacacggtgtagagacacagcaaagtcttatgtaaccaggtgtaagtagaagccaggacgctgaccatcaccgtcaaaagtgtggaggtaaaaagcgcgtcacgccacacggagctgagacggtgctcccaagccacgccgttgcaggccacgaacaacgtccacgttaggatgaggctagaaatgccgatgggcgctgtggcgcacaggttgagcccggcggtggtgaacgagagaagcgccacatacagcgcaaacaccaggccgttgctggggtgtctgtgatcggtgagctccagcgcgcccagaaccaatactggtgtgcagctaagcaatagcggcgagggatcgtcgctgcactcgtagcccagcgaggggtaacccagccaaaccagcgcgctaatgagtacgctgaaagcggtttccagcgtcagcaatccgtagacacgcatgacaatcgcggtccgccgtagccaacacacggcatcttcggaaactgtggacgctgtttccgaataccgggaggagatcgtgcttccctcttccaaggatcggaaagtagcgtccgtcgtttccgcggacgcggcttccctggtacgctccgtttccgacgacgcggtttcccgctgcgtggaaactgtctccatgtcgggaccgcagcgcccggcggcgtatccgcaaggtctcgaagctacagcttgtcagaggaaaagtaggtttgcaaaaaggtgcgcagggtcatgattctcagcaccatcagcagagtgaaaaccagactgagaaacaccttgacggccgccaaaagcgcgcgttccagcggcgtctcgtagcgtacagccagggccgcttcgtggaaatgcgagacggctagacaggtaatgagcacgctgaaggacaagacgatcttaaagcaccaggaccaaccacgcctcaagatgaccaccacgattgccgtgaaggtcaacgtgatcaaagcatggacgaccacgatctgacggcggacggtacgttcgggagccaacaacgctacgccggtgcagctgagaaaggccagtaaggtgaacaacgcggccgagatgaccaacgtaccgtccaggcagagacatatcacgatcaacggcggcacgtgaagcagcgtgtaaaagagcagaacgccgatattgctgggatgcgatgtttcgtaacagtgaatgaagatcactgacgtgacgggtatgacaaagacgaggctgggcgaggactccgtgagacacagacgagaatggtgaaaccacgtcgcgggcgccgcgtagcagaaggcgctgaacaacgcggtcaagccggccagctgccaacccacggcgccataggtgtgcagcgccacgcggcaacagtcgacccaagccagactgcgggtcgccagccgggtctcttggatcccggggggcacgtagatgaccgtgccatcggtgggtacttgaaaccctttttctcttctcatggtgcgctgcgttctctggaaacggctgctctgtccgaaaaccagttccgaacgaaaatctagggcgagagggtggacaacggcgtcgacgacgaagcatgggacaggtcgttcggcgttaacgtcatcgcgtcggacgacggtagttctaagagacgtagatcgctcagcaggtcctgacagttgcggattcgcaagatcagaaaaaaaagggaaatgaacgtaataaagagctgtagcgacgtatgcgccacatcgcgtggcataagaacgtgacggacgaaaaggacctgctgcgaaaagtgaccggcgaagataaggcccaccgtgctgtagaagcccaaaagcagccgcaggggccaagtccagggccgcgtgaagacgatgagaacgttgaccagaaagactacgacccagacgccgttgatgagggtaaattgatcggacagggtgcagttgtcgcgacagatgaagactacttccgcgcagagcaaggtgatgaccaacgtgagcacaaacgacgtcaacacctcgcggggctcctggcaggcacacgtgacacctagcgccgggatgtgcgccaggaggccggcgagtaatagcaccagctgtcggaacggacgacggcagcgcgggtgccggtttcgctgagcgagaaccggtcgctcatagcggaaatacacgaagagcgcggaggccacaggcaccaggaggagcacctcgggcgcccagacaacgtgacaaggaaagcccggacgcgacttgagagtcgctgtagggaagaccagagagaagctacccaagacggccaccgccgcggagatttggaagaggagcaagccggcgattcggacgacaacctcgaagcgatgcacccagcccagcacggccaccacggccgcttcatcatagtcgtcgttgttgccgctgtcgaacagccgccgaaacacgatctgtcgctgggtcgcggtgggaaagcgcagacccatgacagccggaggctatatgaccgcgcgtctaagacgcgagatccgtggggggacttttagatgtttgggcggcccgcggttctaacaggcttgattggtggagacggccggcgcggcgggtgggggaaacgacgagtttttccgttacgccatggttcgcgtgaggtttctctgtacctcccgcaaaaggtcacagcccgaaatggaggccgcgttggtggccccggtggcgcgtgacgataaccaggtcatccaagcgatgagtttgtctaatgagtcctcggtggtgaagaggatgagaatgagcaggtacaggtacaccaggttctcatagagacacaaggtgagcaggtcggcctcggaccacgcgatctcaaacaggcgcgtggtgtcaaagaccgtgacgaccagcatgaagctgagcgccatggcgtaatagcccaaaaaaagtttgtgccccaacggtacgggctgcaggtaaagtgcgatcaagaacgcgataacgccgatcacaaacagcgtgacgatgacctgccatcgacggtgattatggccggctagacccgtgacgcagctgcagaggctaaaaagcacgcaagccaagaggcccgagaaggtcaccagcgtagaggaggagcaggcgctggccacgatcaccgaaagcgtcgtgagcacgctataaatggtgagcaggcccgggctcggcggcgacgtgaacgatccttcatcgcgtttgccgtgcagcagggccaaacagatggtgggcaccatcaaactcaagggcggcataaagccggtgcaacagagaaagacggtgcctttaagatgcggaaaagccagcaccaggcccagacagagcaagaaggtgcaggtgccctgcacggccacggtgctgtagacccgcatacaaagtaaaaagcgacgtacgtcgttcgtcgagacggaggaaatcataatgactccgcgcgagggtcgcgggggtgggggcgcccaggccgtcccggtggcctctgagttcggagacatgacggcggtggctatcaaaaggcgcgtatgagaaaccgtttatagagtgtaatagaattaccgtcattcccacacggcgttcccccataaagtcacgtcacactcgagtaagcgtgaaaaggctttattgttgaataaaaaacacgagtacaacaccgagttgcggtgtcctgtctgtctactgggtgggggaggttcatcgtctgtctctagagggaaggtggggaacgtctaagcgagcgggagcgtgtcatctcccccatctttttacaacaagctgaggagactcacgccgtcgatgcgtccgccgtgtttctcggcgtactgctgcacccagacgtggccgctaaagatggcgacgctcatgtttaggagactcatgacgatggtgtacaacacgacgctgacacagacgctgtttttagacaacgttccacgctggtagatgagatccagggtctcgtaaataagcacggccgaagcggcggtcaccaccaggacgtagagtccgctgtagatcttgctgacccacagcacgggcgaaaagtaaagcaataggtaaaagacgatgacggaccagccgtagccaatcccgatgactttccagcgcgtgggattgttgccggccaggtaggtgagaccgctgcagagaacgaaaaagaccatcaccagggcaaacgacagaccgatgacgcgcctttctccgcaaaagcccgtgcacacggtgatgccggtgttgatcagcaagcacgccaccgtgagatgagcaaaattggtggtgtgtggacgaaactcggcgaaaccgcgtagcatagccagcgtggacacgggtacgatggaggatagggctggcactatgccgttggcgcactgtccctgcacatcggggaaggcgagccaagccagcaagcagaccgtgagggtacaagccagctgccacacgagcccgtgatagacctccatgagcagcttaaagcgtttcaaccattggaagagctgctgttcggccaccagcgcgtggctgcgatggagcggcacgatggtgaccgtcggcgactcatggtgttcggaaaccgaggcggtgtcgcccatgctgccgcttacgaccgctgtcggtctaaggtaggcgtcgatgaaacagtccgtcttatcagcacccggttaccgcggatttgattgacgtcacgagtgtggtcaaaccgtggcggcaccctgtatccgacccgtcgtcatgggctccacaaccagagcctcagaagatggtacatgccgatgaataaagccacattttcgacatagaggcgtagcgagggctgaaaactctccgggaaagaactctgacaggtgatcagggacagatcgtgaattagcatcagcgtcaccgtcaacagcgtcgtcgcgtgtaaaccgagaaagaacggggccgcggcccgcagcagccaaagtcccagcgccgtagcgcagagcagagacaggaccgacggtagccacagccgccggagagacgcgccaggatcgcaacccaaaagcgaggcccccaggcagctgagatctaccgccagggcgagaagagccgcgccgacaaaggcctgcggcgacggctggcacatcagcaaggtcagaaaggctagcgcgtgcggcaggcagtaagccaacaggagtgggagtttgcggggacaacggtcgatcgacggaccgcgtagcagcaggaacaggcagccgacgggcacgacgaggctgagatgagaaagcggcggtgggtcgtcgtcccgtccccgctcgcatagctcggccaccggtggcggcatgagccaccagctgagcacgctgagggcgacggtggcggtaagctggaaggcgacgaggacggaggcgcgcagccataccgccagtctctctaggtaggggactacctcctcgacggtccattctagcgggacgacatgaagcatggcgacaagcgcggctgctgtgaaaacgggcgcggttttataggcattaggacttccccgtcgtactggcggctgtcaaagtcccgttgtccaaaggcgcgccgtccgaaagactaatccaacggggacccgagagcatgagcaacaacgtgagaaagatggccatgctgtccaggtagagacagacggcgtgacggatgcattggttaggtgggcagaaaaagatgaccatgagactgtcgtaggccagaatacccaaaaagaagctgatagagaaggcgcacaacgtcaccactatcttctgcagccaatcggcgtcgcttagcagagcgagcgtgaggaacgaaagcagcatcaccacgtagacgcagctgatgcatttccagcgacgtcggtcacggccacctagaaacgccagccccgtaaaggagataaacaacgccagggtcatcacgtaggaacctactagtacgcggctttcagagcacatttggaagatggccgccgtcaggctgttggccaacagatagatgaaaagcaccgtggcgttactagggtgttcgttgcccaacgtgtacgtgatgaacatgcagacgatgggcacgagcacggtgagaaagaagctgtagttctcgacgcaaaagttgcggttttgtgggaaccccaaccaaaaaacgcttcccaagccgaagctgaaagccagctgaaagatgaagatggcgtacacgcgcagccatacggtgaactttttgaaccactcgagagcctccatgcgggagagcagcagcgcgttagcctcctgcgcctgcatggtggcgacggtctcggcacaaagccgctgcggcgcacctacccttctcttatacacaagcgagcgagtggggcacggtgacgtggtcacgccgcggacacgtcgattaggagacgaactggggcgacgccgctgctgtggcagcgaccgtcgcagcgaccgtcgtctgagcagtgtgggcgctgccgggctcggagggcatgaagtagagcacggagacaaagaggtacatgaggtccatgtacaagcagagcgcgcccgggatataactctcatactcgatgtcgtgcaggatgtcctgcgtatcgcacaccaccgaggtcacgatgacggccaaaccggctatcatcaccaggatctcacttaccgcctcgggaaaaagagaaaatacggcgaatagtaagagaatcagcgtggatgcgcccgtcaatagggaacgctgtaattccacgtcgcgggcaaacagatacgtagcgagcgtgaggaaacaaaatagcgtcactgtggccaccatggcataaatgactgaacgatgactaaagtggaagcctgacgccgtgacagccacgctggtaagcaacgtgtacgtcagtaagatccatacgtttttgggaaagttgggctcggcccaacgcaacagacctaggcacacgatggagatcattaagcaagacagcgtcagacgcacgctggaaaagagctgctccagccggtgcggcaacaccagccagcaaaaggcgcagacgctcataaggatgaggcattgcacccagataaggatgtagatgcgcagcaggaagaccgaccgggctatctggacctgaccgcggagcgacatggcggcaacgccggcggttatcgccgagattcgtctaaatacacgaagcgaactagaaaacgcacacacgtgatttgcaaaaagaaagcagctgccggcttattattttattaaaaatttatctgtgcagaatcataagtttatgatgaataaaaacggggaaagggaatctgcttttagggacccgggtctggtccgtcgtctcccatctggtcgggttcggggatggggacctgtttcagcgtgtgtccgcgggcgtgcatggcttttgctcgccggccgcgctgtaaccaggcctctttctctgtggtcggcgagtcttccgacgggtagggagcctgggagtccatcgtttcaggcccaccgctcgttccctcgaccgtcgtgtcgtcctcgttttcgctattacacggggtttctggagtatcgcctatacggttggcgattctccgggggcggccgctttcgtcctcgtcgctgctatcgccgcccggtaattcgacgccgcattcgttgtacggagcgcggcacatgggcggcggaaagaacttgggcatgcgaaagcagcgttgtccatccacggtctgcgtggtttcatcgttatcctcccataatcccccctgtagcgccggcagcgtttcgacgctgtgagaggggaaggcccagttctggttgtcttgcagcgcgcccgtgggcagtaggtccgtgcggccccaggcgctgctgttgttgggtaccttgtcagtgccgcgagtaggtcgcagaaaccagtccagagcgctctctagctgcgagcgtgtgatggtgcccagtgcgccgtgccagcgcagcacgtctcttttcagcgtgtggtgacagacgggcagctcctccaaccgacactcgccacgcaatccgcggtcgaagcggcagagaccacgcagtttaagcagaccgcacttgagaaacatgtgaaaattatcggcaatgcgatacaggtctgagtcctcgatcttgtgtaggtagaccacgccaaacttgtcgagcagcaccaggccgctgggcacaaaaggcccgtatgccaggtaatagcccacgaggccgacgacgtaccactcgcagcacaagcgttgacgaataaagttcaaaagatcgcgaaagtccgcggccggcatgtggtcaaaaggccggcaggcgcgcaggccctcgatggagcccagcatgagcaacggctccacctcggtgcgacccggcgtgcggatgaccaggttgagaccgctcatttcgcgggccgtcttggccacggccgcagcgtcagtggggtcggtgcagaggaatttttgcacatgatagcgcggttcggtggtggcgaacggcgtttgtgggtgccgatacacatattcgcaccagagtaggccgttcttggaaaaggctttgatatcactggccacctcgtagagcccgtcggtctcccagtcgtagacgtagacggtgccgtaatgacttagcatgagcacgcagggcagttcctgcgcctgcttggtgtttcgtgttagatcgctgtcgggtggacgtacggctagtacaccgacggcttccagggtgtcatcgcagcagagatagtcggcggccagagaacgtgcgtaaatctgcgggatagcggcctgttcgcgcatcactaggaaccagttggcggggttgcgcagtgctacggtggttccctggtggcgctgcacgtaggttctcagcgccggaggatcgtactggcgcagatagaggccttgcagcatcgataacgtcttttgaaagacggtgtttctaaattggaaaacgccgtagtcgcagcggatagcatcttcgcagcgctcgtcgcgctgtcggagataggtgccccaggcttcggcggcggctttggtgagtagggacatgccggcaaagccgtctcgacagcgagtcggataaagcgcgctgcgcgaaagcttaatataggagcagcgtcagacgaatcgcggctggtggcccagggggtgggacgcgccgcctacacaaagtgctcccgaaaatcgaaactcttgacccactccggagacaaatccgtattcagattgatgcgtcgcgcttccacttcggcttccgaaacctcggcctccgtccggtaggcgttaacgatacgctgacccaggtgccaacgttctttctctgccaaacgccgttgctcaaaccattcgtctacgtccttgaggtcaaagacagtgtcctcctcaaggtcaaagcctaggtcttcccactcgtcgtcatcgctctcgtggccggcggccatacgcgcggcaaccgcgtcttcccctcctcttctctcaacgttgggtaccacgttgttttcttcgggttccataggttctgcgccactgtcgtcatcatcctctccctgctcctcatcgtccgccaaggcgtcgtggatcacctccaggttctgattgtcgggtacgacgtggttatcttcgtcgtcgtcgcgtggcatgggcggcggccgacggcggacgaccggcatggcgcggccgtcgtttccttcgtcttcctcttctccgtctcccagggaacgcggtcgacggcgttccgcgaagtcgccgcggaccacgcgcgcctgccagatggtaaacgcgtcccaaccgtcccagttatttagcatttcggcgcggaaacggtcgcctcgacagagccagcgaaactgccgcgcgtagtcgcggtctacgccgctgtcgaacatggtaaagtgaagacgcgccgcctcgcccatgtgtacgcagcctccgttgcgttccagcctggccgcgcgccgcagaccgtgttcgtagcggcgacgcacgtacaccttcatgaggccggcgcgaaagagttcctctaggctgtcggccagacggtagatttcaccggctagacgctgcaggggcggcgagcggtccaggtgcgacttgacgattaccacgtaaaaacgacagaaacggtcgaagatgatgaggaatgacgtgtcaaagaaaccaccggcgcggtaggagcccacggcgcccagcaggtaccagcggcaacgcagttgcagcgtgacgtacatttcgcactcggccaagcgggcggctggcgctacctcgaagggccagcagtccgtcaagcagccgaaactggtcaggagtttcaacgttttggcatggcgtccaggtgtatgaaagttcacgtcgcgtccgtggtgttcgccaacgcaggcggccaacgcgtcggtgtcatgaccgtgacgcagcagcatcgctaccacgtcgtgcggtacccgcgtagcaaacggcgtctgtggctgacggtatacggcttcggtgtacatcataccgtaacgcgccagttcgtccagatgacgcgcgcacagcagcagaatctcttgcgagggttcgtagatgtagaggcgcgtaccgccacccatgcagagcaccagctccgtctcttcatagtgatcgtccaccatgatcacgcatttgcctagcacgataaggcgttcggggcaacaaatcacgtcgtccagcagttggtcgcgcagctccggcatggtgctgccgggccgcacctgcaggaaccagttgtgcggaatgccgagcgacaacacctggtcgacgtggttacggacccagtcgcgaagcacgtcggcgctgtactggcactcaaagatgccctgaaagtcgcccatgacccgcagaaaagtttcgtagcgcgtgtggcaatagaggaattcatcgtttcgcgtaaacgtgggagctccgtcttcccagcgtgtacgccacatgtcaaaagaggccgccagctagacaccccagaaaagaagcagagaaagagagttctttgtgcgatacgttttattccgcgtcctccgctcgacgctcaaatctggatgtactcgcgcacacccgtcaggctctttaagggaaaagggtccgagtacgtcactaaccgcgactgatgcaccagggcggtaatcacccgctctgcgccctcgcgcgtcgacgaacgcgtcgtcaccaggcagtgcagccgcgggcccgtatcgtcctgatgaccagcggcctcgcgctcggctgcttccacaccgacaatgtcgggatccaacacgtagctctgcgagttggtgtcgtagcggtgtagcaccaacgtgttggggtccagacgctcccacgcgccctcgtgcgggtcaaaacgctccgttaaacagagccagtcatactgctgctgcagaatacgccgctcgcgctcgcgtcgctcatcgggcaacgcggcgtcttcgttgaagagaatgtcccgcttgtggtctacggcacgctcgtggtggtgcgggcacagatgacggtgttccatacgcgtctgacgttgacgctcgcgctcaaaacgccggtgtcgaaagaccattttcagcaaccccatgcggaaaaactccgtgatggtgttggcaacgcgccgcacgtagtggttggggtcgtccatctggatggcgtacacggcaccgaaccagtccaacagtaccagcacttcggccacaaaactgcgtcccggccgcggacgtcccgtcacgcctagcacataccacggcgtggccagattagcacggacagcccaccaccaacgacggctctccacctcggtgagcgcacaaaagggccaaatgcggtgtaactgctgcaccgttttcatcagccgcataatcaccgtgccgtaacccggtgtatgcaacttcacgtcgcaacccaggattcgttcggccgtggcgtacgagccctcaggcgttgtgtcattgagaaacaaaacatgcatggtacgcgcgcccttagggtatcgtcgcggaacaggtaccgtcattctccgcagagtggtgtgaatcacgtcgcgatacgcaatctccgaacgtgacacaccgtaacgtgccagttcgtccaggttgtgcgataccaacaccatgtacttttcacgagtgtcgtaggcgtagacgcgagaaaagcgacccataaaaaccacgtacggggtagccaccatgccatcatggtgatcgcgacgtggctcgggcaacaaaataacagcgtatcccaacggcgtcagcggctcgcggcaacagatgagctttgacgccgcctgtttggcggcggtaatgattccgtcctccgtacgtaacatcacatgccagcccttggggggacccaaggacagacagcgtccctcgttacgatgaacgtaacgcgtgatttccattggctccaggcaaaagaacagttccttaaaatcccgcaacacttgtcggtataacgccatgggatcctcagccgccacaggcagcgcggggagctccggcggcacaactgcagcgccgtcagggccagaacccgcagccggatccatcattgcgcgacactctcagccggacaaccggcgtcactgacagaagccgagccaaatacagagaaagcaacgctacaccgtcaccccgctcccaagcgccgcggaaagtgctccgatttttcaccgtcgttcgcgacgttgatttgcctcggtctgagaaccgacctagcgttcggaccggtgcgcagaaacagccggcggtccgagccactgagcggttcacagccccggccgccgatagttaccggagagacgttcgagctgcaggtacatcggcgctccccgctccgccaccccgcgcccgccccagtttatactctccgacgccccgtccaacgcgcctgtggagggccaatcggaccgcgggagctctccaagtggatgacaggcacagccgggtgcccgaccgtgaagagccctcatccacctgaacagaccgctaaccgaaggaccccgaatcgcgtccgtcggtcccgacgtccgtcgccatctggttccctgctgttggctacctctcggatttcaaaaaagagcacgtgccgatgacggtgcacaggaaagagccaaagtgtcacggcgtctttttttatttgtgttcctttcctgttttgtactcgtaaactgttgacgttgtttttacatccaaaagggcaagtaagaaacaggatgaggcatggtaggtttgggcgtggggcggccctccagcacggcggcccgggccgcccggcgggtgagcacccggcgttgcgccgtatctatcttgtgtttcttctgtgtctttttcctatcttgttccgcgacggcctctttcatcacgttcagcatgcgttcctcgacgccctccagggatcctggggaggagggagtcctagtgaggcttccaatgttgttttgtggattttcggtttccttttcttggtcgtcatcgtcggacgtgtcgtcttcctcttgatcctcttcttcgtccgagtagtagacgcatagtccctggttcatcaggctgggattcatcaggttctgacggggaatccgctgttgtagacgtttaaccgcccgttccaggcgagagctcatgccgcaccagacgctgtaacgccgcacgggcccgtagcgggctgtttgttcgcgtacatgatcgttgagctcttgccaatattgtttggcacactccagatcggaggtttgtggatagtcgggtcggatccgcggatcccaactgacatcggcggtgccagagacttcgtccagactgttacgcatagagcaccagtcgggtcggacgataaacctgtccttgcggattaaccatttataacgtagttcgtgatggcgtgtagaggcccgtacacgctccacggtcccaaagcggtcccagaagggaaagttttcgtgagggcagcgacccggcacttccagacgttcggcgtcgtccacggcgtagtgaaaacgccggccggcctggtaaattttgagcagacccacggttaacaacatatccacgctgtcagccaaccgccagatctcgcgtcgagacacgtcaaaatagaaaaattcacaggctcggtcgaccaggatcacgaaatcggcgtgaaagacgccggagggtagcgactcgcccaccacacccattatcatggtttcgcagcataagcggtccacaaagaacttcaacaggtcgttgaattgctccgtctccatacagatgaagggccagacgcctttgaggttctcggcctggccgcagagcagcaacggacgcgtcatctcgcctggagtgcgcagaggcacgcattcgccgcgataacgacaggtcacacgctgcagttcgctgatgctgttgtcgtgcaggcgaaggtcgcagataatatgatccggttgcgtggttagcagcggcgtgcgcatctgctcgccgtagatggcctcgcagtgcaacagtccgtgtcgcgcaaaatcatccagactgtgcgccaggtagtaaagcaccccgcaatcgcggtctaaacaccacacggtttcgtaacgtcctagcaggagcaccagacgggcctggctaggtggctcaatttcctctacatatacgaaaaagtcgtcatcgtccgagtcctcgtcctcagaagaggaccgcggcccgtgtactctgggcaacacggtggtagagaactgcaggacgcccagagactcgagcgactcttcgcagcagatgagctgaccccagggcgtttcgggcccgtcggtgacagccgcgctgccaaagatgtcctcaaactctacaaaatctagacgccatccgggtggcgctgaaacgggaaggctaatgttcatatcagcatagctacgaactaagtggcggatgtcctgccgcaagtcttggcagagaatgagctttcgtaaacccttgagggtcctccgaacaacggccccagacgcgtagcgataggactggcgcatggtgccgcggcgtggagcggcacttggcagcctattttatggagtttcttcagtgacgtggcttgttcacgtcgttcgtgggctgcggttggcagctccggtctgtaaaccacccgaaaagactgacatcgacgtcaaagactcacgtaatttggaacatgtgcgaccgcaaagtgcgtcagaatagcacgtggctttaggacataaaaagtaccgtgaggtctagacgtggtttttgtgattgacacttacaccaggtaagccaagggacggtgaaactgtatgtgaggaacctgggtgcttagacaactaacgtgtaatgctttttacaggaccgttcaacaggtgatactacctgcaaggtaatgactacatctactacaactaccactaatatcatgctacaggtgagcaacgtaacgaatcacaccttgaatagcaccgaaatttatcagttgttcgagtacactcggttcggggtatggttgatgtgcatcgtgggcacgtttctgaacatgctggtgattaccaccatcctgtactaccgtcgtaagaaaaaatctccgagcgatacctacatctgcaacctggctgtagccgatctgttgattgtcgtcggcctgccgttttttctagaatatgccaagcatcaccccaaactcagccgagaggtggtttgttcgggactcaacgcttgtttctacatctgtctttttgccggcgtttgttttctcatcaacctgtcgatggatcgctattgcgtcattgtctggggtgtagaattgaaccgcgttcgaaataacaagcgggctacctgttgggtggtgattttttggatactggccgcgctcatggggatgccacactacctgatgtacagtcataccaataacgagtgtgttggtgaatttgctaacgagacttcaggttggttccccgtctttttgaacaccaaagtcaacatttgcggctacctggcgcccatcgtgctgatggcgtacacgtacaaccgtatggtgcggtttatcattaactacgtgggtaaatggcacatgcagacgctccacgttcttttagttgtggttgtatcttttgccagcttttggttccccttcaatctggcactatttttagaatccatccgtcttttatcgggaacgcaaaacgagactctccaaaccgttattactttctgtctatacgtcggtcagtttttggcctacgttcgcgcttgtctgaatcctgggatctacatcctagtaggcactcaaatgaggaaggacatgtggacaaccctaagggtattcgcctgttgctgcgtgaagcaggagataccttaccaggacattgatattgagctacaaaaggacatacaaagaagggccaaacacaccaaacgtacccattatgacagaaaacatgcacctatggagtccggggaggaggaatttctgttgtaattcgatcctctctcacgcgtccgccgcacatctatttttgctaattgcacgtttcttcgtggtcacgtcggctcgaagaggttggtgtgaaaacgtcatctcgccgacgtggtgaaccgctcatatagaccaaaccggacgctgcctcagtctctcggtgcgtggaccagacggcgtccatgcaccgagggcagaactggtgctatcatgacaccgacgacgacgaccgcggaactcacgacggagtttgactacgatgaagacgcgactccttgtgttttcaccgacgtgcttaatcagtcaaagccagttacgttgtttctgtacggcgttgtctttctcttcggttccatcggcaacttcttggtgatcttcaccatcacctggcgacgtcggattcaatgctccggcgatgtttactttatcaacctcgcggccgccgatttgcttttcgtttgtacactacctctgtggatgcaatacctcctagatcacaactccctagccagcgtgccgtgtacgttactcactgcctgtttctacgtggctatgtttgccagtttgtgttttatcacggagattgcactcgatcgctactacgctattgtttacatgagatatcggcctgtaaaacaggcctgccttttcagtattttttggtggatctttgccgtgatcatcgccattccacactttatggtggtgaccaaaaaagacaatcaatgtatgaccgactacgactacttagaggtcagttacccgatcatcctcaacgtagaactcatgctcggtgctttcgtgatcccgctcagcgtcatcagctattgctactaccgcatttccagaatcgttgcggtgtctcaatcgcgccacaaaggtcgcattgtacgggtacttatagcggtcgtgcttgtctttatcatcttttggctgccgtaccacctgacgctgtttgtggacacgttaaaactcctcaaatggatctccagcagctgcgagttcgaaagatcgctcaaacgtgcgcttatcttgaccgagtcgctcgccttttgtcactgttgtctcaatccgctgctgtacgtcttcgtgggcaccaagtttcggcaagaactgcactgtctgcttgccgagtttcgccagcgactcttttcccgcgatgtatcctggtaccacagcatgagcttttcgcgtcggggctcgccgagtcgaagagagacatcttccgacacgctgtccgacgaggtgtgtcgcgtctcacaaattataccgtaataaaaaagcgctacctcggccttttcatacaaaccccgtgtccgcccctcttttccccgtgcccgatatacacgatattaaacccacgaccatttccgtgcgattagcgaaccggaaaagtttatggggaaaaagacgtaggaaaggatcatgtagaaaaacatgcggtgtttccaatggtggctctacagtgggtggtggtggctcacgtttggatgtgctcggaccgtgacggtgggtttcgtcgcgcccacggtccgggcacaatcaaccgtggtccgctctgagccggctccgccgtcggaaacccgacgagacaacaatgacacgtcttacttcagcagcacctctttccattcttccgtgtcccctgccacctcagtggaccgtcaatttcgacggaccacgtacgaccgttgggacggtcgacgttggctgcgtacccgctacgggaacgccagcgcctgcgtgacgggcacccaatggagcaccaacttttttttctctcagtgtgagcactatcctagtttcgtgaaactcaacggggtgcagcgctggacacctgttcggagacctatgggcgaggttgcctactacgggggttgttgtatggtgggcgggggtaatcgtgcgtacgtgatactcgtgagcggttacgggaccgccagctacggcaacgctttacgcgtggattttgggcgcggcaactgcacggcgccaaaacgcacctaccctcggcgcttagaactgcacgatggccgcacagaccctagccgttgcgatccctaccaagtgtatttctacggtctacagtgtcctgagcaactggttatcaccgcccacggcggcgtgggtatgcgccgctgccctaccggctctcgtcccaccccgtcccggccccaccggcatgacttggagaacgagctacatggtctgtgtgtggatcttctggtgtgcgtccttttattagctctgctgctgttggagctcgttcccatggaagccgtgcgtcacccgctgcttttctggcgacgcgtggcgttatcgccgtccacttccaaggtggatcgcgccgtcaagctgtgtcttcggcgcatgttgggtctgccgccgccaccgtcagtcgcaccacctggggaaaagaaggagctaccggctcaggcggccttgtcgccgccactgaccacctggtcactaccgccgtttccgtccacgcggatacctgacagtccgccgccaccgtaccagcttcgtcacgccacgtcactagtgacggtacccacgctgctgttatatacgtcatccgacatcggtgacacagcttcagaaacaacgtgtgtggcgcacgctacttatggggaacccccggagcccgctcgatcgacggctacggttcaggaatgtaccgttcttaccgccccgaattgcggcatcgtcaacaacgacggcgcggtctctgaaggccaagaccatggagatgcggttcaccatagcctggatgtggtttcccagtgtgctgctgatactggggttgttgacacctccgagtaacgggtgcaccgtcgatgttggacgaaacgtatccattcgagaacagtgccgccttcgaaacggtgcgacgttctccaagggagacatcgaaggtaacttcagtgggcccgtcgtcgtggagttggactacgaagacatcgatattactggcgaacggcagcgacttcggttccatctcagcggactcgggtgtcctacaaaggaaaatataagaaaagacaatgaaagcgacgtcaacggtggaattcgctgggctctatatatacaaaccggcgacgccaagtacggtattcgtaaccagcatttgagtatacggttaatgtatcctggggaaaaaaatacacaacagctgttgggttctgatttcagttgcgaacgtcaccggagaccgtccacgccgttgggaaagaacgccgaagtgcctcccgcgacccgcacgtcttctacatacggcgtcctcagcgcttttgtagtgtggatcggatccggcctcaatatcatctggtggaccggcatcgtgcttctggcggcggacgctctcggacttggcgagcgttggctgaggttggcactgtcccaccgggataaacatcacgcatcgagaaccgcggcgctccagtgtcaacgcgacatgttacttcggcaacgtcgacgggctcggcggctgcacgccgtttctgaaggcaaactgcaggaagagaagaaacgacagtctgctctggtctggaacgttgaggcgcgaccctttccgttcacacatcagctgattgtgctgccccctcctgtagcgtcagctcctcctgcggttccctcgcagccccccgagtattcgtctgtgtttccgcctgtataaaaataaagagacgggaggctgatcgcggccttcagcgtctcatttgtctttactctcgagtgcggtcggtgtctcatcggtgagacgaggccgccgcccgacaagttcgatctcatgtcgctcttggagcgcgaagagagttggcgtcgcgtagtcgactactcgcacaacctgtggtgtacgtgcggtaactggcaaagccacgttgagattcaggacgaggagcccaactgcgagcagccggagcccgcacactggctagaatacgtggcggtccagtggcaggcccgggttcgcgattctcacgatcgctggtgtctctgcaacgcctggcgtgatcacgccttgcgcggccgttggggtacggcgtattcctcgggttcctcggcctcttcctccggtttcgtcgcggagagcaagttcacctggtggaaacgactgcgccacagtacccggcgctggttgtttcgccgccggcgagctcgatacactccgtctaactgtggggaaagtagcactagcagcggccagagtagcggtgacgagagtaactgcagtctacgcacccacggcgtgtacacacggggtgaacaacactaatcgataagtcgcgtgtaggcgactggctacatcaaccggatatctgcggggatttaaaaagacgacccgttgtcatccggcttagagcaaaccgtccttttatcatcttccgtcgccatggctatgtacacatccgaatccgaacgcgactggcgtcgtgtaatccacgactcgcacggcctgtggtgcgattgcggcgactggcgagagcacctctattgtgtgtacgacagccattttcagcgacgacccacgacccgagccgaacggagggccgccaattggcggcgacagatgcggcggttacaccgtctgtggtgtttttgtcaggactggaagtgtcacgcgttatacgccgagtgggacggcaaagaatccgacgacgagtcgtcggcgtcttcctcgggcgaagcgccagagcaacaggtccccgcttggaagaccgtgcgagccttctcgcgggcctaccaccaccgcattaaccggggtctgcggggcacgcccccaccgcgcaacttgccgggatacgagcacgcttccgagggctggcggttttgcaatcgacgggaacggcgagaggacgatcttcgcacgcgggctgagccggaccgcgtggtgttccagttagggggagtacctcctcgccgtcaccgggaaacttacgtgtaagaacacggcgtgacaataaacaacatagcgtaaatccccgtgtgatgtgtgtgattgacgttcgggaaacatgtccccatcatcagcgtcacaactgacgtgggttggtcactgacgtgcaggatgttacgcgagtcagagaatcgcataagaacggggtggtgagcgggttcccacaggagtctctggcgcaaaagcaccatgagcctcaggttccccgagagggcgggttacgagaaactgggataccgcccgcatgccaaacgcgtgtgggtgcatgacccgttgggattgacgcggtttatcatgaggcaactcatgatgtacccgctggtgttgccgttcacttttccgttttacgtgccgcggtcctagcacgtcagtggtgacgctgataattgcaacatggcccatgacgaacccgcttgggacgaacgtcaataccacgtcaaaccaccgtgacttggctgaacgttgaaacataaagccaaagcgccgtcggcacttggcttcagagcagcgcctcggggcgatgcgacggcgatgaacttagagcaactcatcaacgtccttggtctgctcgtctggattgccgctcgtgctgtcagccgcgttggtccgcatggctccggactcgtttatcgtgagcttcatgatttctacgggtatctgcagctggaccttctgggaccagtggtggcggggaatcgctcagtccggacctggagagagcaggcggaccgagccagagggaccttcgttcggcgttcaggccttaatactagccacatcttacctgtcggcggcctgtctgggggctccggtaccttacccgccggcctgtatcgtcccgaagaagaggtgttcctcctcttgaaccgctgccatgggccactgtcaacgccgaaaagcgcttgtctggctgaggttggtgtcgctaatgccagttttttatctcgcttcaatgtcggtgattttgacggagcgtcatgggaaaacggtaccgctcccgatggagagcccggggtatgctgaaattcttcttaaaattacgtaaacaacgtcgtccagtcgttgtgccgcgattcgtacggttcatcgtctacgtcgttttgttcaccgtcgctgtgcaacgcgtgaaacaagagcgtgatgcgcaccttcggcggtatgaagaacgattgcagaaaaaccgtgcacggcgtcggcagagttttccgtgacttggggcggtgggtccgagctgcggtatgggtcacggcggcgtgcgtcttattgacaaagatgccgatgtgtgactaaaaaacgtcccagccccagagcgatgtgtttcaataaaaattatgtagtatcatattatgcgtgtcctggtttttcattttttggatgtatttgtcgcataaaaggcggtgggatgtggggatgaaatatatccagatacgcagttttgttatcctaacaaaacccgtgtcatgctaaaaacggtaatgcaggatgaaagtcccgtgtgtggggggggggggcatatagtagtcgcttttaccgctgggcatacgctatgcttgtatttgtgactatactatgtgcagtcgtgtgtcgatgttcctattgggaagggtgtgaatgtaggaggtataaagaatggtgggacgcaggaagacatcgctagacacagctgtattgtgctagccccgcttagcgtcatgggtaaaacggtgataaagcgtcaaaacaccatgggggggggggggcaggaagcttggtggcggtgttcattaaatgcattccgtgtatttattggtacatttgcaaatcgccgagtataccggtataatgtggcaataatcgtattatgtgtgtactatgcagcgaagaggacaatatcagtgtaacgtgaagcaagtgtgggaacaatgccagtgaagaatatataaaagccagaaacatacataaatgaattgctagatacagggttcaatgtgtacagaaaaaagacgcaacaacgacggggggggggcgtacgattaatcctacatattacagtacaggctaccgcgtggtgttgtgtatgttacgatgcggtgtgcctgtcggtgtaattggatgtatgttacttatccgtggcgttgtgatagtgttgtgaaaaataattgtcgtgagcataatgacagctgcaatataaaatcactttattaagcattgtaatgataatgcgtggctacattagaaaacgtgacgcgtcgcatgtcgcggcacaatctggcagcggggtcggggtagggtacggtgggaggcatgtacacagatggaacaaaagcagaagtaacgtgagacggagcatatagtccagtatccagcggttcctgagtagcaccacccatcaactgaatgccctcatgagtaaaagtctgcgggcggcagcccttggggaccgttggcatgggacgatcaatctccaaaccacagcgtaacaccgttttcttccaacgtcgttgatagacgtcgtttttacggttactccccagaacccagaaagtctcgtccaagtcgtaccaggaatcttctccagggacacgcgacggtttccaatcctcgtcgtctcgtctcaaagcacgtcccaaactggcttgaggagtcaacggtggttctgtgggtcgggtgtagcgcgagtgctttcccttcatgaccgattcgtcttccttgcctttaggctttttggtctttttgtgtatcatctggccaccggcttccataaccaccgtggccaagtccagtcccagagcttgagcgtcggcgcggcgtctggcgtcttgcagatagtcttccacatttgcacagatgaccggatgtttggtggctagggtgagcacctcagcctcgccgcggcccggacgtagcaaaaaagctaactgcccgtgcggctcgcgcgcccacagcgcggcgcgcgggtgcaggtgcagcgcgtcccagcgcggccgctcccactgctcgcggtccagctcgggcagcagccgccgcgcggcctcggcggcgggcgccgactcgcgccccagcgccagcgcgcccagcacgcccgcgcgcagaaagtgcgacagctccgccgccagcgggtacacgtgtccgtccagcgggcagtacccgaacacggcgcccagctcgtccagcagcaccaccagcatggcgcgcggtacggtccccgacgccgccggacccaccatcgccgccggacccaccatcaccgtcggcgccgccgctgctgccgctgccgccgcgtccgccccgaccaccgcgtgcgcgtccgcgcttggcacgcaaatcgcgctcccgccggcggcgccgtacggctgcggaggtaaagtcacagcagaccccacggctcccgctatcgcgcacggcgcgtccccgccggcggcctccgtctccgtgccgctcgcccccggcggcgacgtcgtccccgccgccgtccctgtcgccggccccgccgcgcagcccagccaccgcgacggcagcaccgcgcccagcgccagccagccgcagcacagacgctggttcaggtgccgacgcacggccgtcagcagcgacgcggggtgcggcgccgacgcgaacggctcgtactgcgccagctcctgccacgcgcccagcagcaccatcggctgcagtcgcctgcccggcgtctgcagtgccaccgtcgtgccggcccaccggcggcgcagctcccgtccgagcgccgtcgcctcctcggcgcgcagcaacgtctggcgaagcgccggctgaggcagcagcgtcgcgcgcggggtgcccacgcccagccggttgcagcggtacagccgcaccacctcgcccgcgccgtgccgaaaccactcgtccgcgtcgcgcgccgccaggatcagcgtgttgttcgccaggtcgtacacgaacacgcggaacccggcgcccagcgccaggtacagtccgtcctgcgcgcacagaccctcgggatggccggccttgtcgcccaccgtcgggtcggccgcggggtccacctcgtgcaccacggtcgccaccagcacgatccacgcgtcccgcggcgacagctgacgcaggtccgtcgcgcccacgccgttcatctggctgcgcggcgtcacccgcgcgtagaatccgtacggccgtccgagcggcagcagcgtgcccgcgtcgcgctgcgaccacttgcgcatggcgcggcccgtgctgttggccaaaaacgccgcgcgccacacggcgcccatggcctggtattccagctccgtcagcgcctggcgctccaccggaatctgagacagcaacaagcgctccgggccgtgccaaaagttggtgttgttgccgctacccggaggggcgcccggcggcccgcggggttctacccggtggacggcgtgggccggtgtcgccgtacccgcagcactcgtactagtccccgctgttgacgtcgtttccaaagaagaagaacgagaggaaccaacccccgaaggccctccggctccgcggccgcgaccgaggggcggggggcgcggcgacatgccgttgcgctgggccatggccgccggacacctccgacgtccactatataccaagcaaacccgcgtcagcgaccacgccgtttacacacgcggacgccgcagtcgcccgtgtgccccggccgacacgcatctggcttttataggcagcgacgtgcacggcgcttgctggcgccgcctcgccgcgcagtcgggaagcccgtggaaatgcacccggcagccgacggcgcagtggactggcaaaggcagcccgagcgagaacccatccccgaggggcgggggggtgttttttgcgggggggtgaaaattggagttgcgtgtgtggacggcgaatagttgcgtgtggtgcggaggacggcgacggcgaataaaagcgacgtgcgcggcgcacgtcgcaaagaagacgcgtgtctgtgtctgtctgattccccggggaaaagagggagttcccaggggacggcagcgcgggtccctggggacacacgaaaaacaacggccagagacaagacgcggaaaagaggaagtccctaggggaccgcgagggcaacgacagacgaagtacggcacaacccgcgtcgaggacacacgcagaggcggtcgcccaggggaggggggggggtcgcggaccccgtggcacactgcttccatccagccgcgcacaccgcacccctgacacaccccgccagcacacccccgacacacccgccacacgcccgcgacacaccctgacacacccggcacacgccctgacacacccggcacacccgacacccaccccacgcacgcacccacccagccgcgccccagacacaccccgaccgccgccagtgcgacttcttggcgccgtaagcgcgccgccgcttctgcggcgtgttccccacggcgcttcctgcgcgctgccggtgcgtcaaggagttctgcggtgtttgttcacgggccggcgctggggacggggtgttgcgggcgctcggagggctttcgcggcgggtgtttgcacggagtttctactaagcttttgcgcggcgcttcgcttttcggggcggggacggcggtgttttcgggcgtactggggttgacggcgctggtaacgggagttacgctggggacggggacgggggttgcgccgggaacggggggtgtgcgtgggtgtgcggggccgggcacgggggccttttgcggcggggacggtggtggggacggcgcgttgcgggaccggggacggaggtggcgccggagacacggggtgacgtcggagacaggggccttttgcggcagggacggggcgtttgcggcggggacgggggcctttcgcggcggacacggggacgggggtggcgccggggacgggggcctttcgcggcggggaacacagacggcacgcacacgcagctcgcttcagcggtcgccctatcagaaccgccgctactctttattaacgtcttaatccccccgcttctacacgcaacgctgcatacagctatgctcacactctatctcttcacagcgacatgttgcttcgtctatgcgctgccgcgacaagcacaagtggacaccgccatctgccaccacacatggcccatgtgctccgacgtcccgcatcctacgtcgtctgctcacaacacggcgcttccttccccgcacgccatctccatcgaacaccgtctgctgcattcgccgtcgcctccacgagagaacatacgccacagcatgcgctgtcgccgccgcgacatggcctcctccgcttccacacctgtttcgcacacccaacctctggctgccaaccacagacgttcaaggatcacgtacgcaacgaccgatcccaccaattctccaacggcctcgcccgccaagtcagacaagctggaagccgacgcagacacagcactccatcgacgcccggcctcgctgttgcgccacctcttccagccctgccacgcccaacgcggcacttccaacagagccacatcccagagggcttccttgaacgccgtgcaccacaaactctgcggcgcgatgatatcttcgtcgtgttccaccacttgcacaccgctgattatggacttgccgtcgctgtccgtggaactatctgcaggacacaagaaaaaagaaacaccaaccgagggtgggtggggcggtgaagaaggggaggacgacgttctcgccacaatccgcaacacgttgtccgccccaacctcacctgctgcggctaccacgcatcgactgtcgttccctggagaatcgaccttctgcctcaccgctgtttccgagtgctcacaacgtcgaacatcaacggctgcattaacgccgccgccgccagcggtagctgctgcgttctctttttcgtccacggtctccgagaccggcacttttccgcagagcacaacaggccgcacacgtgtcgacgacaccgccgtcgttaccgccggagacccgcgctctcctgtgacacacgtaactctcctccagatattccgtctgcgtagctcgctgctgacgagcaggtccggcggcgctctccgcggaggtgagcacgaggccatccccaaagtcgcgtcgctgttctggacgctgctcaaagcaacacagatagttgacatgactcacaaaacaccgagtgccgactctcaccgcaacccacaaaaatacaccgaccgcccacaacgcctgctgttgacagcacttgccatctggcaacgaacctacaatgacacgcgtgccgcccacgcgccgcaagtgcgcttgctcggcgacatcctcacttaccgcagaccgcaaactgccaccgcgtctaccaaagcacacacgcagcagcagccagaggaaccaaaaggccaacagatctggacgcagacagccggccaggccgcgccacacggcgacgagccgcatagcgacggcgagctacgccgcgagtcgcattctgcaccgccgacgtctcgtacactacccgatacgattttggcagtgaaacgccgttccgttgcccaacggtcacacgtccgactggacgcgaaacccggactgaatgagcgggacggctttcgccgacggttgttgctccccttatccggctatttccgcgcaaacgagctccggaataaacaatttatgggctatggaacagagaacggccttaagaacacttgtctcacccgccctctgggtgccgcggggggtgtgcgggagccgattggggagcgacaagacagagacgtggcggactctgcgacacgacgcgttttccacacgttgtacgccgcactgcagaccgtacgggtgtggtataccgcgttaggcaccgcgtggcgtacctcggggtctcgtacgcgtgtctctctattcggtggtccacggcgtcgcgatcggcaggcgggccggctgcggcgctcggagctgtagccgtctcggacttgtctagccgctgccgctcccgttgcgtgcctgctgctgcgtaaagtacatcagggccaccagacagactccgatgaagatgacgatggcaacgctgatccaccatctcctgatggcgttgtcgggccaccagggccgctccttggtcttgaccagataagtagtggtggtgacacacttgggcgccgtcatgccgcgactcctccaggttgctccggcgtttgcttcggcgggtccctggtcgagggagacggtccctgcggtgaaggaggaagagcagaaggaataggagtttccctggagcagcgccgtaggcaagtgccgcggcacgtgtccgggtggctttataacggccgtcgatgatggtttttaaaccgggacgacggtggttcacgtgaagtaccaggcggcgatgctgaccatgacgccgagcagcagagtgaagacgatgacgttgaacaggatttccagatagtgtcccatgttccgcgtggttcctgcgcggttcctgcgtggtttctttttttcctgtgttaacaccggcgttttcgggacggtcggttaacgtgggtttcaggggaaggctgtaagcacggggaaggagcgctgataggcgagacaacgcacgaaggtccaagcggcggcggcgccgacttccaccatcaagccaacgaccagcatccgcagcagcagcgcccaggcgatctcgcgctcgacgacggctacggcgacgaggcagaacatctcaacccagacgacaagcgccaggaggtagagcacggccggaaagaccgcgggcgttagcatttggtcgcggagaaggaaacaaaaacggttgaaaacggggactgtagagttgctttgttcaggagacgacgacgggagcagacgggatggcgctggatacgctagcggggctggctatctgcgtgggtctggtcatgggtgtcaccgtgatcgcgtcgtgcgcgctgctggtgttttattattgcgatgagaaggaggatggccgtccgtcgaagctgttgcaacgtagcattcgacgttggcgacacggccttagcaccgaatccttaaccgctatcctgccggacggttcgtccacggagcaggagatctaccacacgcgactttaagtcacggaggaagttacgtgggtaggagggcaccgtgccccgaggcggcgacgggctagcgtataacaagccgcgcgacaacgggcgagcggcggtgagacacacgcgcgcacgtcggcggcgatagccatgagttccgatagcaattttgatccctggattcccgtgtgcgtcgtggtggtcatgacctccgtagtcctgttcgcaggtctgcacgtgtacctgtggtacgttcggcggcagctggtggcgttctgcctggagaaggtgtgcgtccgctgctgcggtaaagatgagacgacgccgctggtggaggatgccgaaccgccggccgagctggaaatggtggaagtgtcggacgagtgttactaggacatcgccgctgccgatgggcgccggcggacgtgactcggcagccactgtagggataaatagtgcgatggcgtttgtgagagaacgcagtagcgatgggttgcgacgtgcacgatccttcgtgccaatgccaatggggtgtccccgcgatcatcgtgatttggataacatgcgcggccttgggaatttggtgtttggcgggttcgtcagcgaatattttttctggacctggcatcgcggctgtggtcgtctgttccgttttcatgattttcctctgcgcgtaccttattcgctaccgggaatttttcaaagattccataatcgacattttaacttgccgatgggtgcgctactgcagctgcagctgtaagtgcagctgtaaatgcatctcgggcccctgtagccgctgctgttcagcgtgttacaaggagacgatgatttatgacatggtccaatacggtcatcgacggcgtcccggacacggcgacgatcctgacagggtgatctgcgagatagtcgagagtcccccggtttcggcgccgacggtgttcgcccccccgccgtcggaggagtcccaccagcccgtcatcccaccgcagccgccaacaccgacatcggaacccaaaccgaagaaaggtagggcgaaagacaaaccgaagggtaaactgaagaacaaaccttcgtgcgagccgacggtgagttcacaaccaccgtcgcagccgacggcgatacccggcggtccgcccgacgcgcctccccccgccatgccgcagatgccacccggcgtggccgaggcggtacaagctgccgtgcagacggccgtggccgcggctctacaacaacagcagcagcagcatcagaccggaacgtaacccgcccccggtgtgataaggaattttccgacttggcccacatctccttcctcagtgtttggacaataaacacattccttgccaaaaaatgacgtttccagaaatccaaggcataaatgtccgtacaccggcccttcccgacacggagcttgagattccaagcaggagagaagatcatggtgtggctgtggctcggcgtcgggctcctcggcggtaccggactggcttccctggtcctggccatttccttatttacccagcgccgaggccgcaagcgatccgacgagacttcgtcgcgaggccggctcccgggtgctgcttctgataagcgtggtgcctgcgcgtgctgctatcgaattccgaaagaagacgtcgtcgagccgctggatctggaactggggctcatgcgggtggccacccacccgccgacgccgcaggtgccgcggtgtacgtcgctctacataggagaggatggtctgccgatagataaacccgagtttcctccggcgcgattcgagatccccgacgtatccacgccgggaacgccgaccagcatcggccgatctccgtcgcattgctcctcgtcgagctctttgtcgtcctcggccagcgtcgacacggtactgcatcagccgccgccatcctggaagccacctccgccgcccgggcgcaagaagcggccgcctacgccgccggtccgggcccccaccacgcggctgtcgtcgcacaggcccccgacgccgatacccgcgccgcgtaagaacctgagcacgccgcccaccaagaaaacaccgccgcccacgaaacccaagccggtcggctggacaccgccggtgacgcccaggcccttcccgaaaacgccgacgccacaaaagccaccgcggaatccgagactgccgcgcaccgtcgggctggagaatctctcgaaggtgggactctcgtgtccctgtccccgaccccgcacgccgacggagccgaccacgctgcctatcgtgtcggtttccgagttagccccgcctcctcgatggtcggacatcgaggaactcttggaaaaggcggtgcagagcgtcatgaaggacgccgagtcaatgcagatgacctgagaccgaaacagcgagcgcgtccgttgtacagttgtatagcagcacacgccttccctctttttcaccgcagctaagagagagaaagagagtatgtcagtcaagggcgtggagatgccagaaatgacgtgggacttggacgttggaaataaatggcggcgtcgaaaggccctgagtcgcattcaccggttctgggaatgtcgactacgggtgtggtggctgagtgacgccggcgtaagagaaaccgacccaccgcgtccccgacgccgcccgacttggatgaccgcggtgtttcacgttatctgtgccgttttgcttacgcttatgattatggccatcggcgcgctcatcgcgtacttaagatattaccaccaggacagttggcgagacatgctccacgatctattttgcggctgtcattatcctgagaagtgccgtcggcaccacgagcggcagagaagcagacggcgagccatggatgtgcccgacccggaactcggcgacccggcccgccggccgttgaacggggccatgtactacggcagcggctgtcgcttcgacacggtggaaatggtggacgagacgagacccgcgccgccggcgctgtcatcgcccgaaaccggcgacgatagcaacgacgacgcggttgccggcggaggtgctggcggggtaacatcatccgcgactcgtacgacgtcgtcgaacgcgctgctgccagaatggatggatgcggtacatgtggcggtccaagccgccgttcaagcgaccgtgcaagtaagtggcccgcgggagaacgccgtatctcccgctacgtaagagggttgagggggccgttcccgcgcgagtgctgtacaaaagagagagactgggacgtagatccggacagaggacggtcaccatggacgatctgccgctgaacgtcgggttacccatcatcggcgtgatgctcgtgctgatcgtggccattctctgctatctagcttaccattggcacgacaccttcaaactggtgcgcatgtttttgagctaccgctggctgatccgctgttgcgagctgtacggggaatacgagcgccggttcgcggacctgtcgtcgctgggcctcggcgccgtacggcgggagtcggacagacgataccgtttctccgaacggcccgatgagatcttggtccgttgggaggaagtgtcttcccagtgcagctacgcgtcgtcgcggataacagaccgccgcgcgggttcatcgtcttcgtcgtcggtccacgtcgctaaccagagaaacagcgtgcctccgccggacatggcggtgacggcgccgctgaccgacgtcgatctgttgaaacccgtgacgggatccgcgacgcagttcaccaccgtagccatggtacattatcatcaagaatacacgtgaatgagaaaaagaaaaaagaggggagcggatcgcggtaatgtcgttttgacattctctgctcgatctactcagcgtctgcacgaaacggcgtccgcacggaggcgagcccaagcgtatctgcagcaagcggttctttctctcggtgatggtggcagcatcggtggcgggagcttgttcggacgatggacggtgaggagtccctggcgatcaggcggctcccgggtgtggagttcaacgggtggtaatggtggcggtgatcggtgttagaaaacggtggccctggcaaacatatatctactgtaaaccctctgctctgttaataaaaagcacacttttcacatgagtcagtaattttattgtgtagtggaaatttttacgtcattgggaaaccccagaatgaaagagtataatgtgcacatcaccgggggttccctgtcagtacgaatgtacacaacgcgggttacattacgataaactttccggtaaaacgatgccgatacagcgtgtataacgctgattgttacgacagacgggttcgtatatcaattatatagtaataaacatgctgtggatattaattttatttgcactcgccgcatcggcgagtgaaaccactacaggtaccagctctaattccagtcaatctactagtgctaccgccaacacgaccgtatcgacatgtattaatgcctctaacggcagtagctggacagtaccacagctcgcgctgcttgccgctagcggctggacattatctggactccttctcttatttacctgctgcttttgctgcttttggttagtacgtaaaatctgcagctgctgcggcaattcctccgagtcagagagcaaaacaacccacgcgtacaccaatgccgcattcacttcttccgacgcgacgttacccatgggcactacagggtcgtacactcccccacaggacggctcatttccacctccgcctcggtgacgcaggctaaaccgaaacccacgttgaatctgacgcggtttcggaaagcctgagacgtcactttcacaatgacgttcgtagacacgttgatcataaaacaccgtggaggctaaggcttcggtagggagagacctcaactgttcctgatgagcacccacgctctcatctcttcagacttgtcatgaccccagctcagactaacgccactaccaccgtgcacccgcacgacacaaaaaacggcagcggcggtagtgccctgccgaccctcgtcgttttcggcttcattattacgctacttttctttctctttatgctctacttttggaacaacgacgtgttccgtaagctgcttcgctgcgcttggatccagcgctgctgcgaccgcttcgacgcgtggcaagacgaggtcatctaccgtcgtccatcacgtcgttcccagagcgacgacgagagtcgtactaacagcgtgtcatcgtacgttcttttatcacccgcgtccgatggcggttttgacaacccggcactgacagaggccgtcgacagcgtggacgactgggcaaccacctcggttttttacgccacgtccgacgaaacggcggacaccgagcgccgagactcgcagcaactgctcatcgagcttccgccggagccgctcccacccgacgtggtagcggccatgcagaaagcggtgaaacgcgccgtacagaacgcgctgcgccacagccacgactcttggcagcttcatcagaccctgtgacgcagatgaacgttccttcttaaacatccgaggtagcaatgagacaggtcgcgtaccgccggcgacgcgagagttcctgcgcggtgctggtccaccacgtcggccgcgacggcgacggcgaggaggaggcagcaaaaaagacctgcaaaaaaaccggacgctcagtcgcgggcatcccgggcgagaagctgcgtcgcacggtggtcaccaccacgccggcccgacgtttgagcggccgacacacggagcaggagcaggcgcgcagcgtctctgcgaaaaagggaaagaaagaatcatcatgtgccgccgagagtcgctccgaactctgccgtggctgttctgggtgctgttgagctgcccgcgactcctcgaatattcttcctcttcgttccccttcgccaccgctgacattgccgaaaagatgtgggccgagaattatgagaccacgtcgccggcgccggtgttggtcgccgagggagagcaagttaccatcccctgcacggtcatgacacactcctggcccatggtctccattcgcgcacgtttctgtcgttcccacgacggcagcgacgagctcatcctggacgccgtcaaaggccatcggctgatgaacggactccagtaccgcctgccgtacgccacttggaatttctcgcaattgcatctcggccaaatattctcgctgactttcaacgtatcgacggacacggccggcatgtacgaatgcgtgctgcgcaactacagccacggcctcatcatgcaacgcttcgtaattctcacgcaactggagacgctcagccggcccgacgaaccttgctgcacgccggcgttaggtcgttactcgctgggagaccagatctggtcgccgacgccctggcgtctacggaatcacgactgcgggatgtaccgcggttttcaacgcaactacttctatatcggccgcgccgacgccgaggattgctggaaacccgcatgtccggacgaggaacccgaccgctgttggacagtgatacagcgttaccggctccccggcgactgctaccgttcgcagccacacccgccgaaatttttaccggtgacgccagcaccgccggccgacatagacaccgggatgtctccctgggccactcggggaatcgcggcatttttgggattttggagtattttcaccgtatgtttcctatgctacctgtgttacctgcagtgctgtggacgctggtgccccacgccgggaaggggacgacgaggtggtgagggctatcgacgcctaccgacttacgatagttaccccggtgttaaaaagatgaagaggtgagaacacgcataaaataaaaaaataacatgttaaaaaatgcagtgtgtgaaatgtgaatagtgtgattaaaatatgcggattgaatgggcgtgttggttattcggatactttgtgtcatccgttgggagcgaacggtcattatcctatcgttaccacctggaatctaattcatctgccaacgtggtttgtaacggaaacatttccgtgtttgtaaacggcaccctaggtgtgcgatataacattacggtaggaatcagttcgtctttattaataggacaccttactatacaaacattggagtcatggttcacatcctgggtccaaaataagagttacagcaaacaacccctaagtaccaccgaaacgctttacaatatagatagcgaaaacattcatcgcgtatctcaatattttcacacaagatggataaaatctctgcaagaaaatcacacttgcgacctcacaaacagtacacctacctatacatatcaagcaaacgtaaacaacacgaattacctaacactaacatcctcgggatggcaagaccgtctaaattataccgccataaatagtacacactttaacctcacagaatcgaacataaccagcattcacaaatatctcaacactacctgcatagaaagactccgtaactacaccttgaagtccgtatacaccacaactgtgcctcaaaacgtaacaacacctcagcacacaacaaccactctgtacacacctccaaatgcaataacaattcaagatacaactcaaagccatactgtacagacgccgtcttttaacgacacacataacgtgacggaacacacgttaaacataaactacgttttatcacaaaaaacgaataacacaacatcaccgtgggtatatgccatacctatgggcgctacagccacaataggcgccagtttatatatcggaaaacactttacgccggttaggttcgtatacgaagtatggcgcggtcagtaaatatgattccgatttaacacatatactccccacgatcctcgaacaccttacagcatatgagcaaaaaacaacaaagtataaccaccatcacaattgggcgaataacatgctgtcatccactagcgtctattaatctaatgtttaacgggagctgtactgtcgccgttaaaatgtccatgggaatcaacggatcaaccaacgtccatcagctatgtgattgtgctctacctgggtaatcgctgtcagccttggcgacaggtgtaatcacagctgtcacataactctcgaagcctccaatcacagcagcacacatagtcctaacgccattggcgtgtataaaagttcggaaaacttgacggttgtacggcacgacaaatcgatgtagtggtatgtgtttccagcagggaccgtgtgcggtctcttaggctcgctatactgtgactagaaactggttacctgtgaagatggctgactatcctgttgtgtcctggaaaagctttcagcgtcgtaggtggactttgcagtatgcgggttagtgaagttatgtcatttatttacgtttacgatctcgtattacaaaccgcggagaggatgataccgttcggccccatgagttatttttattcttccggtaggaggcatgaagcctctggtgatgcttattttgctgagtatgctattggcatgcatagggaaaactgaaatatgcaaacccgaagaagtgcaattaggaaatcagtgttgtcccccatgtaaacaaggatatcgtgttacaggacaatgtacgcaatatacgagtacaacatgtacactttgccctaacggtacgtatgtatcagggctttacaattgtaccaattgcactgagtgtaatgacactgaggttacaattcgtaactgcacttccactaataacaccgtatgcgcatctaagaattatacgtcgttgtccgttccaggcgtccaacatcataagcaacgacaaaatcataccgcacatgtaaccgtcaaacaagggaaaagtggtcgtcatactctagcctggttgtccctcttcatctttctcgtgggtatcatacttttaattctctatcttatagccgcctatcggagtgagagatgccaacagtgttgctcaatcggcaaaattttctaccgcaccctgtaagcttcctgttgttgtttttacatcacggtgcgatgaagtcacacagataattacagatgagctgttcatattttttattattttttccaattcctgcactaaaaaaagaagcactttacggaaccgtgtctgaatatctgtggggaatttaggtactttttgccgacgtcaggaaaaataagctgtcgcctacataagagcccggtgctatcgtgctgtcactctttcttgttgccttcgatgtacggcgtcctggctcattactactccttcatcagtagccccagcgttatggttaattttaaacatcataacgccgtgcagctgttgtgtgcacggacccgagacggcactgccggatgggaacgtttaacccatcatgcgtcgtatcacgcgaactatggggcatacgccgtgttgatggctacatcgcaaagaaagtccctagtgttacatcgatacagtgccgtgacagccgtggccctgcagctcatgcctgttgagatgctccgtaagctagatcagtcggactgggtacggggtgcctggatcgtgtcagagacttttccaaccagcgaccccaaaggattttggagcgacgatgactcctcgatgggtggaagtgatgattgatgatgagaacctgacaagaaagacgagagagaaattcagagctgtcattgtagaattagtctagattcctgataataaacggtatcgattttgaaacctaattgacgtgtgatcgatttttaaacctgtgtgttgtgtgattgattggtatgtggggggatccgatttcaaaggggggtacttatcgggaattgatgtgtcatggacgcagttttgagtgattttccgggaataccggatattacgaattgatgtaagttacgtcagtaattaagtcaggatgcggtttattttcggtttgctgattggtcttgtaatcgtgtatacgtattattatgaagtacaaagtacggaactacgttgcccatgcactaatggtttacacgatcctttatatggcatattttatgctggtcgtgaccctccacgtcctcccggttgtgaaaaagatcaatattatttaaaacctcccaaaggtaaagctgtatgcttaggtccacatcatcatttatcaatatggctcaatggtcaaaatagtagtttatggcacaaagtgctggtgacgggaaaaaacggtaatggaccacacgtaactaagaaaggtgactttcctagaggtcgaaaaaatataatgatttagcttaatatggatatatacgatagctgataaattttccacgaaaaaggataacgcaatatgtttttgatatggtgctaacatggttacatcattcgattataaactcgcatatcaaacttttatcggtaccacacctgtcattgaccgcatatatgttatttaccgtgtgtttcccggtccatcttttagaattggaagattacgacaggcgttgtcgttgtaacaaccaaattctgttgaataccctgccggtcggaactcaactgcttaagccaatcgcagcgagcgaaagctgcaatcgtcaggaagtgctggctattttaaaggacaaaggaaccaagtgtctcaatcctaacgcgcaagccgtgcgtcgtcacatcaaccggctattttttcggttaatcttagacgaggaacaacgcatttacgacgtagtgtctaccaatattgagttcggtgcctggccagtccctacggcctacaaagcctttctctggaaatacgccaagaaacttaattaccactactttagactgcgttggtgatcatgtccctattttaccgtgcggtagccctgggcacgctgagcgctctggtgtggtatagcactagtatcctggcagagattaacgaagaatcctgctcctcatcttctgtggaccacgaagactgcgaggaaccggacgagatcgttcgcgaagagcaagactatcgggctctgctggccttttccctagtgatttgcggtacgctcctcgtcacttgtgtgatctgagacgtcatgctggtagcgtttatgagtcgggcggtggccggcacgccgcatttcctaacccgcgcagcatgttgcgcttgctgttcacgctcgtcctactggccctccacgggccgtctgtcaacgctagccgcgactatgtgcatgttcggctactgagctaccgaggcgaccccctggtcttcaagcacactttttcgggtgtgcgtcgacccttcaccgagctaggctgggctgtgtgtcgcgactgggacagtatgcattgcacgcctttctggtctaccgatctggagcagatgaccgactcggtgcgacgttacagcacggtgagccccggcaaggaagtgacgcttcagcttcacgggaaccaaaccgtacagccgtcgtttctaagctttacgtgccgcctgcagctagaacccgtggtggaaaatgttggcctctacgtggcctacgtggtcaacgacggtgaacgcccacagcagttttttacaccgcaagtagacgtggtacgctttgctctatatctagaaacgctctcccggatcgtggaaccgttagaatcaggtcgcctggcagtggaatttgatacgcctgacctagctctggcgcccgatttagtaagcagcctcttcgtggccggacacggcgagaccgacttttacatgaactggacgctgcgtcgcagtcagacccactacctggaggagatggccttacaggtggagattctaaagccccgcggcgtacgtcaccgcgctattatccaccatcctaagctacagccgggcgttggcctgtggatagatttctgcgtgtaccgctacaacgcgcgcctgacccgcggctacgtacgatacaccctgtcaccgaaagcgcgcttgcccgcaaaagcagagggttggctggtgtcactagacagattcatcgtgcagtacctcaacacattgctgattacaatgatggcggcgatatgggctcgcgttttgataacctacctggtgtcgcggcgtcggtagaggcttgcggaaaccacgtcctcgtcacacgtcgttcgcggacatagcaagaaattcacgtcgccacgtctcgagaatgccggccccgcggggtccccttcgcgcaacattcctggccctggtcgcgttcggattgctgtttcagatagacctcagcgacgctacaaatgtgaccaacagcacaaacgtccctactagcaccagcagcagaaatagcgtcgacaacgccacgagtagcggacccacgaccgggatcaacatgaccaccacccacgagtcttccgttcacaacgtgcgcaatgacaaaatcatgaaagtgctggctatcctcttctacatcgtgacaggcacctccattttcagcttcatagcggtactcatcgcggtagtttactcctcgtgttgcaagcacccgggccgctttcgtttcgccgacgaagaagccgtcaatctgttggacgacacggacgacagtggcggcagcagcccgtttggcagcggttcccgacgaggttctcagatccccgccggattttgttcctcgagcccttatcagcggttggaaactcgggactgggacgaggaggaggaggcgtccgcggcccgcgagcgcatgaaacatgatcctgagaacgtcatctatttcagaaaggatggcaacttggacacgtcgttcgtgaatcccaattatgggagaggctcgcctttgaccatcgaatctcacctctcggacaatgaggaggaccccatcaggtactacgtctcggtgtacgatgaactgaccgcctcggaaatggaagaaccttccaacagcaccagctggcagattcccaaactaatgaaagttgctacgcaacccgtctcgctcagagatcccgagtacgactaggctttttttttttgtctttcggttccaactctttccccgccccattacctcgcctatactatgtgtatgatgtctcataataaagctctctttctcagtctgcaacatgcggctgtgtcgggtgtggctgtctgtttgtctgtgcgccgtggtgctgggtcagtgccagcgggagaccgcagaaaaaaacgattattaccgagtaccgcattactgggacgcgtgctctcgcgcgctgcctgaccaaacccgttacaagtatgtggaacagctcgtggacctcacgttgaactaccactacgatgcgagccacggcttggacaactttgacgtgctcaagaggtgagggtacgcgctaaaggtgtatgacaacgggaaggtaagggcgaacgggtaacgggtaggtaaccgcatggggtgtgaaatgacgttcggaacctgtgcttgcagaatcaacgtgaccgaggtgtcgttgctcatcagcgactttagacgtcagaaccgtcgcggcggcaccaacaaaaggaccacgttcaacgccgccggttcgctggcgcctcacgcccggagcctcgagttcagcgtgcggctctttgccaactagcctgcgtcacgggaaataatatgctacggcttctgcttcgtcaccactttcactgcctgcttctgtgcgcggtttgggcaacgccctgtctggcgtctccgtggttcacgctaacggcgaaccagaatccgtccccgccatggtctaaactgacgtatcccaaaccgcatgacgcggcgacgttttactgtccttttctctatccctcgcccccacggtccccctcgcaattcccggggttccagcgggtatcaacgggtcccgagtgtcgcaacgagaccctgtatctgctgtacaaccgggaaggccagaccttggtggagagaagctccacctgggtgaaaaaggtgatctggtatctgagcggtcgcaatcagaccatcctccaacggatgccccgaacggcttcgaaaccgagcgacggaaacgtgcagatcagcgtggaagacgccaagatttttggagcgcacatggtgcccaagcagaccaagctgctacgtttcgtcgtcaacgatggcacacgttatcagatgtgtgtgatgaaactggagagctgggcccacgtcttccgggactacagcgtgtcttttcaggtgcgattgacgttcaccgaggccaataaccagacttacaccttctgcacccatcccaatctcatcgtttgagcccgtcgcgcgcgcagggaattttgaaaaccgcgcgtcatgagtcccaaaaacctgacgccgttcttgacggcgttgtggctgctattgggtcacagccgcgtgccgcgggtacgcgcagaagaatgttgcgaattcataaacgtcaaccacccgccggaacgctgttacgatttcaaaatgtgcaatcgcttcaccgtcgcgtacgtattttcatgattgtctgcgttctgtggtgcgtctggatctgtctctcgacgtttctgatagccatgttccatcgacgatcctcgggaatgccagagtagattttcatgaatccacaggctgcggtgtccggacggcgaagtctgctacagtcccgagaaaacggctgagattcgcgggatcgtcaccaccatgacccattcattgacacgccaggtcgtacacaacaaactgacgagctgcaactacaatccgtaagtctcttcctctagggccttacagcctatgggagagtaagacagagagggacaaaacatcattaaaaaaaaaaagtctaatttcacgttttgtaccccccttcccctccgtgttgtaggttatacctcgaagctgacgggcgaatacgctgcggcaaagtgaacgacaaggcgcagtacctgctgggcgccgctggcagcgttccctatcgatggatcaacctggaatacgacaagataacccggatcgtgggcctggatcagtacctggagagcgttaagaaacacaaacggctggatgtgtgccgcgctaaaatgggctatatgctgcagtgaataataaaatgtgtgtttgtccgaaatacgcgttttgagatttctgtcgccgactaaattcatgtcgcgcgatagtggtgtttatcgccgatagatatggcgatattggaaaaatcgatatttgaaaatatggcatattgaaaatgtcgccgatgtgagtttctgtgtaactgatatcgccatttttccaaaagtgatttttgggcatacgcgatatctggcgatagcgcttatatcgtttacgggggatggcgatagacgactttggcgacttgggcgattctgtgtgtcgcaaatatcgcagtttcgatataggtgacagacgatatgaggccatatcgccgatagaggcgacatcaagttggcacatggccaattcatatcgatatatacattgaatcaatattggccattagccatattagtcattggttatatagcataaatcaatattggctaatggccattgcatatgttgtatccatatcataatatgtacatttatattggctcatgtccaatatgaccgccatgttgacattgattattgactagttattaatagtaatcaattacggggtcattagttcatagcccatatatggagttccgcgttacataacttacggtaaatggcccgcctggctgaccgcccaacgacccccggccattgacgtcaataatgacgtgagttcccatagcaacgccaatagggactttccattgacgtcaatgggtggagtatttacggtaaactgcccacttggcagtacatcaagtgtatcatatgccaagtacgccccctattgacgtcaatgacggtaaatggcccgcctggcattatgcccagtacatgaccttacgggactttcctacttggcagtacatctacgtattagtcatcgctattaccatggtgatgcggttttggcagtacatcaatgggcgtggatagcggtttgactcacggggatttccaagtctccaccccattgacgtcaatgggagtttgttttggcaccaaaatcaacgggactttccaaaatgtcgtaataactccgccccattgacgcaaatgggcggtaggcgtgtacggtgggaggtctatataagcagagctcgtttagtgaaccgtcagatcgcctggagacgccatccacgctgttttgacctccatagaagacaccgggaccgatccagcctccgcggccgggaacggtgcattggaacgcggattccccgtgccaagagtgacgtaagtaccgcctatagactctataggcacacccctttggctcttatgcatgctatactgtttttggcttggggcctatacacccccgcttccttatgctataggtgatggtatagcttagcctataggtgtgggttattgaccattattgaccactcccctattggtgacgatactttccattactaatccataacatggctctttgccacaactatctttattggctatatgccaatactctgtccttcagagactgacacggactctgtatttttacaggatggggtcccatttattatttacaaattcacatatacaacaacaccgtccccattacccgcagtttttattaaacatagcgtgggatctccacgcgaatctcgggtacgtgttccggacatgggttcttctccggtagcggcggagcttctacatccgagccctgctcccatgcctccagcggctcatggtcgctcggcagctccttgctcctaacagtggaggccagacttaggcacagcacgatgcccaccaccaccagtgtgccgcacaaggccgtggcggtagggtatgtgtctgaaaatgagctcggggagcgggcttgcaccgctgacgcatttggaagacttaaggcagcggcagaagaagatgcaggcagctgagttgttgtgttctgataagagtcagaggtaactcccgttgcggtgctgttaacggtggagggcagtgtagtctgagcagtactcgttgctgccgcgcgcgccaccagacataatagctgacagactaacagactgttcctttccatggatcttttctgcagtcaccgtccttgacacgatggagtcctctgccaagagaaagatggaccctgacaaccctgacgagggcccttcctccaaggtgccacggtacgtgtcgggacttgtgttcccctttttttaataaaaagttatatctttaatgttatatacatatttcctgtatgtgacccatgtgcttatgactctatttctaatgtgtttaggcccgagacacccgtgtccaaggccacgacgttcctgcagactatgttaaggaaggaggttaacagtcagctgaacctgggagacccgctgttcccagaattggccgaagaatctctcaaaacctttgaacaagtgaccgaggattgcaacgagaaccccgaaaaagatgtcctggcagaactcggtaagtctgttgacatgtatgtgatatatactaacctgcatgggacgtggatttacttgtgtatgtcagatagagtgaagattaactcttgcatgtgagcggggcatcgagatagcgataaatgagtcaggaggacggatacttatatgtgttgttatcctcctctacagtcaaacagattaaggttcgagtggacatggtgcggcatagaatcaaggagcacatgctgaaaaaatatacccagacggaagagaaattcactggcgcctttaatatgatggggggatgtttgcagaatgccttagatatcttagataaggttcatgagcctttcgaggagatgaagtgtattgggctaactatgcagagcatgtatgagaactacattgtacccgaggataagcgggagatgtggatggcttgtattaaggagctgcatgatgtgaccaagggcgccgctaacaagttagggggtgcactgaaggctaaggcccgtgctaagaaggatgaacttaagagaaagatgatttatatgtgctacaggaatatagagttctttaccaagaactcagccttccctaagaccaccaatggctgcagtcaggccatggcggcattgcagaacttgcctcagtgctcccctgatgagattatggcttatgcccagaaaatgtttaagattttggatgaggagagagacaaggtgctcacgcacattgatcacatatttatggatatcctcactacatgtgtggaaaccatgtgtaatgagtacaaggtcaccagtgacgcttgtatgatgaccatgtacgggtccatctctctcttaagtgaattttgtcgggtgctgtgctgctatatcttagaggagactagtgtgatgatggccaagcggcctctgataaccaagcctgaggttatcaatatcatgaagcgccgcattgaggagatctgcatgaaggtctttgcccagtacattctgggggccgatcctctgagagtctgctctcctagtgtggatgacctacgggccatcgctgaggagtcagatgaggaagatgctattgtagcctacactttggccaccgctggtgctagctcctctgattctctggtgtcacccccagagtcccctgtacccgcgactatccctctgtcctcagtgattgtggctgagaacagtgatcaggaagaaagtgagcagagtgatgaggaacaggaggagggtgctcaggaggagcgggaggacactgtgtctgtcaagtctgagccagtgtctgagatagaggaagttgcctcagaggaagaggaggatggtgctgaggaacccaccacctctggaggcaagagcacccaccctatggtgactagaagcaaggctgaccagtaaactattgtatatatatcagttactgttatggatcccacgtcactattgtatactctatattatactctatgttatactctgtaatcctactcaataaacgtgtcacgcctgtgaaaccgtactaagtctcccgtgtcttcttatcaccatcaggtgacatcctcgcccaggctgtcaatcatgccggtatcgattccagtagcaccggccccacgctgacaacccactcttgcagcgttagcagcgcccctcttaacaagccgacccccaccagcgtcgcggttactaacactcctctccccggggcatccgctactcccgagctcagcccgcgtaagaaaccgcgcaaaaccacgcgtcctttcaaggtgattattaaaccgcccgtgcctcccgcgcctatcatgctgcccctcatcaaacaggaagacatcaagcccgagcccgactttaccatccagtaccgcaacaagattatcgataccgccggctgtatcgtgatctctgatagcgaggaagaacagggtgaagaagtcgaaacccgcggtgctaccgcgtcttccccttccaccggcagcggcacgccgcgagtgacctctcccacgcacccgctctcccagatgaaccaccctcctcttcccgatcccttgggccggcccgatgaagatagttcctcttcgtcttcctcctcctgcagttcggcttcggactcggagagtgagtccgaggagatgaaatgcagcagtggcggaggagcatccgtgacctcgagccaccatgggcgcggcggttttggtggcgcggcctcctcttctctgctgagctgcggccatcagagcagcggcggggcgagcaccggaccccgcaagaagaagagcaaacgcatctccgagttggacaacgagaaggtgcgcaatatcatgaaagataagaacacccccttctgcacacccaacgtgcagactcggcggggtcgcgtcaagattgacgaggtgagccgcatgttccgcaacaccaatcgctctcttgagtacaagaacctgcccttcacgattcccagtatgcaccaggtgttagatgaggccatcaaagcttgcaaaaccatgcaggtgaacaacaagggcatccagatcatctacacccgcaatcatgaggtgaagagtgaggtggatgcggtgcggtgtcgcctgggcaccatgtgcaacctggccctctccactcccttcctcatggagcacaccatgcctgtgacacacccacccgaagtggcgcagcgcacggccgatgcttgtaacgaaggcgtcaaggccgcgtggagcctcaaagaattgcacacccaccaattatgcccccgttcctccgattaccgcaacatgatcatccacgctgccacccccgtggacctgttgggcgctctcaacctgtgcctgcccctgatgcaaaagttccccaaacaggtcatggtgcgcatcttctccaccaaccagggtgggttcatgctgcctatctacgagacggccgcgaaggcctacgccgtggggcagtttgagcagcccaccgagacccctcccgaagacctggacaccctgagcctggccatcgaggcagccatccaggacctgaggaacaagtctcagtaagtgaaaaactggaaagagagacatggactcttgtacatagtgattccccgtgacagtattaacgtgtggtgagaaggctgtttaataaaagtagcttttttttatatatctccgtctctggtctcgtgatgtgggggtgcgggtggtcccggatacttgtccttctccccctcatgtgtatggctctgatggcgaggggcacacacggggcttacatctgctcccccaacccagggagacttagaatctcttgtgccctctcggtgttggaccaaagactgtggtgggagatccagtattcatcgggtcgtcttacccgagtcctggtctttcatgataacggtgagaagggtgatgacttacatctcacggatacccgtcactgcacttcctgtacacatccctatgtgatttctttgattaccccgctgaccatcaatgccacgctacggctgctgatacgagatgggatgtacgggcggggggagaaagagttgtgcatcgcccatctacccaccctgcgagacatccgcacctgccgcgtcgacgccgacctaggactcctatacgccgtctgtctgatcctgtcgttcagcatcgtcgcggcggccctgtggaaggtagattacgacagatccgttgcggttgggcccaaaagctataaatcatagccactgacgcaggcacgtcattgacagccggcgacgtcgagagggtaactatgtaccgtgcgggggtgacgctattagtggtggcggtggtaagttcggggagatgggacgtggtgacggtggcggccgcgattgggatcgggtggtatgagcctgaagtgagcatggcttacatgtatcaacacaatgacactaacttgactattttttgtaacactacagcttgcaattcgccctttttggcctcagggatgatgataagtgccccgttgaaaacacgctttctcaccagcaaggtcaactacagcaatgacatggataacgacagaaaaaattatacccaccaactgaaatacatgctagcgggggcacctggaacttatgtaaatagcagcgtcacctgctggggctctaacgggacttttggtgccaagactttcttagtcaaatccatgatcaacaatacggatagtaacaccaatacgtcaatcattcactttgttcagcaagatgaactggtggataatcccgcgtactttaggcgtagcaatcaccgagcctttatgattgtcatactgacgcaagtggtttttgtggtcttcattattaacgcttcttttatctggagctggacgtttaagcgtcacaagcggtgacgcggccccctgccacatatagctcgtccacacgccgtctcgtcacacagcaacatgtgtcccgtgctggcgatcgtactcgtggttgcgctcttgggcgacacgcacccgggagtggaaagtagcaccacaagcgccgtcacgtcccctagtaataccaccgccacatccactacgtcaataagtacctctaacaacgtcacttctgctgtcaccaccacggtacaaacctctacctcgtccgcctccacctccgtgatagccacgacgcagaaagaggggcgcctgtatactgtgaattgcgaagccagctacagctacgaccaagtgtctctaaacgccacctgcaaagttatcctgttgaataacaccaaaaatccagacattttatcagttacttgttatgcacggacagactgcaagggtcccttcactcaggtggggtatcttagcgctttcccccccgataatgaaggtaagtagcacctacctttctgttcaaccccttttcttccctcgtcaacctgataccaaaataaacattaattttatccacaggaaaactacatctctcctacaacgctactgctcaagagctgcttatctcgggactcaggccgcaggagaccactgagtacacgtgctctttcttcagctggggccgccatcacaacgccacttgggaccttttcacctatcccatctacgccgtgtacgggactcgcttgaacgccaccacgatgcgggttcgcgtgctgcttcaagaacacgaacactgcttgctcaacggtagcagcctctatcaccccaacagcaccgtgcatctgcatcagggcaaccagctcattccgccgtggaatattagtaacgtgacgtataacggacaacggttacgcgagtttgtcttctacctcaacggcacgtatactgtcgtgcgtctccacgttcagattgcgggccgaagctttaccaccacctacgtgtttatcaagagcgacccgctgttcgaggaccggctgctggcctacggcgtgctggctttcctggtgttcatggtgattattcttttgtacgtgacctacatgctggcgcgccggcgggactggtcctataagagactggaggagcccgttgaggaaaagaaacacccggtgccctacttcaagcagtggtagggcccgagacgagaggagtggctgctgtgttgtctttatttcgctgacttctacggagttttccctcagcctctgtgttcccaacacgtccccccgctgagcgttggcggcgatggtcatgttctcccaggaccacgtccagatcgtctacggctccacacgcatctgcaagtccctggccccggccaacaagagaaagacccatcgcaccatcgtggtagcgccgcggcggggttttttgcgtattcccccggacgggcaggacgtcaaccacgtcaagatcgtaccgaccaccacctcctccctcgcgccgccccgtgacgacgagcggcggccgaccccgccgttgcggccgccgctcacagtctatccctatggcacgtcgctgatccgcaggtcagctagggacgcaaaactccgctccaagctaatcgtcttccatataactcggcccgcactcggtcagcacccgcagaatcccgggatctcgggccctgcggccatggatcatagtgagttcctcaccagctttcgtcgcgaggtcgatcggcaaaccgtactgaccgccgagaacgcgcccgccactgtggaagtctgtctgggcgacgctctgcccggcggcgtcatgggtggcggaggactgccggcgggtgtgggctcggccagcgccgccgtggccgccgctgccgccgctgtggccggagtgcccgtcgccgcaaaccccgtcatgcccgccaccgccacggtcaccacgccgcccatgatcgaccttaccagccaccaccggccgctgacgctgtttacaccggcctccgcggccgctgcgcccgccgtggccaccaacggcggtaacgccacctacattttgccagccgactgtcggtacgcgccactctttgccagcaagtataagtacgtcttcgaagaggtgtcacgtctcatgcggctgcacgactccacggccgtgcagctgcagatcagcgcctcgtgcggcaacgctttccaggccctcaagagtgccctgctcaagttgcacaacgtcaccgtgttagcgggccagcagctcatcacgcagacgatgccgcacacgccacaggccgtagccacgttcaaattctttcaccaggatcccaaccgcgttctggactgcatccgtccggtggtgccgcgctctacttcgtaccacgagacgggtgtgtaccagatgtgggtctcgggcgccaccaagaaagacctgtttgacgccgtgaccctgtgcgcttccatcgtagaaaagcagccagacgtatttaatatcaacgtcagcttgttgacgtacccttcgatcgcggcgccccacttgccgctgtacaacgaattcaccagctttcgcctgcccacctcatgaagcggcggcggcgatggcggggctggttgcttttcctggccctgtgcttttgcttactgtgtgaagcggtggaaaccaacgcgaccaccgttaccagtaccaccgctgccgccgccacgacaaacactaccgtcgccaccaccggtaccactactacctcccctaacgtcacttcaaccacgagtaacaccgtcatcactcccaccacggtttcctcggtcagcaatctgacatccagcgccacgtcgattcccatctcaacgtcaacggtttctggaacaagaaacacaaggaataataataccacaaccatcggtacgaacgttacttccccctccccttctgtatccatacttaccaccgtgacaccggccgcgacttctaccacctccaacaacggggatgtaacatccgactacactccaacttttgacctggaaaacattaccaccacccgcgctcccacgcgtcctcccgcccaggacctttgtagccataacctgtcaatcatcctgtacgaagaggaatctcagagcagcgtagacattgcggtggatgaagaagagccagaactggaggacgacgacgagtacgacgaactgtggttccccctctacttcgaggctgagtgcaacctaaattacacgctacaatacgtcaatcacagttgtgattacagcgtgcgccagtcgtctgtctcattccccccgtggcgcgacatcgactcagttaccttcgtacccaggaacctctccaactgtagcgcccacggtctggccgtcatcgtcgcgggtaaccaaacctggtacgtgaatccgtttagcctggctcacctgctggatgcaatatataacgttttagggatcgaagacctgagcgccaactttcggcgccaactggctccttaccgtcacactctcatcgtgccgcagacttgatgtgccgccgcccggattgcggcttctctttctcacctggaccggtggtactgctgtggtgttgccttctgctgcccattgtttcctcagtcgccgtcagcgtcgctcctaccgccgccgagaaagtccccgcggagtgtcccgaactaacgcgccgatgcctgttgggtgaggtgtttcagggtgacaagtatgaaagttggctgcgtccgttggtgaatgttaccgggcgcaatggcccgctatcgcaacttatccgttaccgtcccgttacgccggaggccgccaactccgtgctgttggacgatgctttcctggacactctggccctgctgtacaacaatccggatcaattgcgggccctgctgacactgttgagctcggacacagcgccgcgctggatgacggtgatgcgcggctacagcgagtgcggcgatggctcgccggccgtgtacacgtgcgtggacgacctgtgccgcggctacgacctcacgcgactgtcatacgggcgcagcatcttcacggaacacgtgttaggcttcgagctggtgccaccgtctctctttaacgtggtggtggccatacgcaacgaagccacgcgtaccaaccgcgccgtgcgtctgcccgtgagcaccgctgccgcgcccgagggcatcacgctcttttacggcctgtacaacgcagtgaaggaattttgcctgcgtcaccagctggacccgccgctgctacgccacctagataaatactacgccggactgccgcccgagctgaagcagacgcgcgtcaacctgccggctcactcgcgctatggccctcaagcagtggatgctcgctaacattgctgataataaaggctctctgttaacccccgacgagcaggctcgcgtgttttgtctgagcgccgactggatccgcttcctcagcttgcccgaccacgacacggtgctgctgcgcgacacggtggcggcggtggagggcgcgcggcaactcgagatggtgtacccggcacccgagcacgtacaccgctggagctatctgtgtccgcccgagcaggtgcgcgtggtgatcgtgggccaggacccgtactgcgacggcagcgccagcggcctggccttcggcacgctggcaggccgaccaccgccgccctccctcaacaacgtgtttcgcgaactggcgcgtacggtggacgggtttcagcgtccggcctcgggttgcctggacgcctgggcgcgacgcggcgtgctgctgctcaacaccgtgttcaccgtggtgcacggacagcctggatctcaccgtcacttaggctggcagacgctgagtaaccatgtgatccggaggctgtcagagcgccgggagcatctggtgttcatgctgtggggcgccgacgcgcacacctgcgagtacctgatcgaccgacggcggcacttggtactcaagtcctgccacccgtcgccgcgcaacaccacccgcgccttcgtgggcaacgaccactttatactggccaacgcgtatctggacacgcattaccgagagaccatggactggcgactctgtgggtgattgatgataatagacacaccggggagacaaggtggtgaactgtgatgtctatctctttattgtaaaaaaaaatcagtgaccacaatatatatagacacacaccgaaaggggtggaaacccaaatgtccaagcgcgtcctgtttcataatttttccggtctcggctctgttttttaatcgtcgaaaaacgccgcgatcgaggcggcggcgatcgcagcctcctcgctgggatcgataatttcgagtccgtcctcgaggaacgagggccctcgccggcggccgctgccggcgacttgcgacaaccggagcagaggatcgttgtcctcgtcctcatggcggttgtttctccgtcgcgatctccgagaggaggaggacgacgacgatgcggcctgccgccggctgtttctaccaccgccaccaccgccgcctcctcgggtattgttccgggcccgaccccgacgtccgcccggcggtggtggtggcggcggcagtggagtcgaagaagacgaggaagagttactggcagccgcggcggtggcgacaacggggtttaccacgtagggcttgatttcacacacgggccggggaggagcagctggtgtttcgactgcggcggcaacgggcgcgacaccggcgacggaacctgagggtacaacaccggtggtgacgagtggcggacatgcggctgctggggggccaacgccggctgtggagacagctgcggcggtcctcgcgacgctgctgtggttgacgacgacagtcccgcccgacgtctctggcaagagtctgctggaaaccagggggagatcgcacaatcttttctccttacaatcattgagcattttggtcaatgactgtataatgtcatcaaaacgcggactgcgaggaggctgaggcgccgcggattcctgcgaattcggaggaacacggcagttagagactggagtggtggaatcattctcctcctccgactgcggtggtgcctccgccgcctcagccggagccctcctcatcctcctcatcatcattaaccccgcagccgccgccgtcgccgccgcctcggactcctgcaccgtctcgcccgcgctgtgggcgctgctgggtcgagggagcgaaagaagtgacgacggcgacgtcgacgacggcgacgaaaccaccgctccgcgctcaatgggtagaagtaacgcaccgtcggtgccggcggccacgtccgtcacggcgttatggtggtgatgatggtggtggtggttattggaggaagaagagaccgcggaggatgaggacgagtaattgagaaaggccaccgcttcagacgtgtccagcggcagcgacatgcggccgctgccgccgccaccaccaccgccagcaccaccggactgctgctccgtctcgttcttgccgccgccgccatggccttcgtgctgtgcggtggtcttttgtctcttcgcctcccggaggggaggagagcctacagacgggacgacacatagcgcacgaaaaagcacatggttatcatccacacaaccaccagcgcaccaacaccgctcgcctgctcgctcgtgcgctacggggggctcacgagtccactcggaaagcaccgtgacgcgaggagggccgggactcaccgtcgttctcggaggagggaggcggccgccgctccttctgccggttcatcaaccggggatcccgcagcagtccgttggcggagtccgaggagtgctgaccgccgctcccgccgccgccaccgccaccaccagtgccgccgcctccaccaccaccggcagacgaggacgattttttgcgccgttcttcgtgacgctgttcctgccttcgccgttgctgttcctccgcagaagggccgtcgcgagtcccgccgctgccacccagcgaggacacgcagacggcggaggcggtagacgcggcgccgcaaccaccgcctccgctggaggattcgccgtggtttttcaggtaatgccgcacgtaagtcacttgcaaattaccgttctcggaaatcatagtgagcagcgcgctctcattgggtccgctggagcccaccaccgaggagacggatttgttaaagacgataccgccgcgtacaaagaggtgctcctgaagttccccgtcgcccgtaatgtcaatggacatgaagccctgctgcgtcttggcgccggccgaagcctcgccgtgctgcataatggtagcgcagagccagcccttgttgaggtgcaacaccttgccatcgccgtccacgcagttgaccagacgcgcggtatcaaagacgaactggcgcacgtcgaaagtctgattgacgctctgatgcaggatgcggttaggattcgcaaaagtccaatattttcgcacgacggtagtagggagatccatgacgcggcggcgcaaagcgcgagcgcaacgctcgtcggaggccgtggagcgagtgccgccgcagccggcagagcgccgaaccccgtcgcagactctatttatacatcatctttccagcccgcctagcaacacccacaaacaacgtcacgacgcaacgtggttaaacagtacgtttattaaagtaactgggtgaacgacaccggagcggactgcaaatcgcaacgctactttctcgagtgcagatactcttcgagacggctaaacaacgtgtccaactcgctgagacctttccgcgtgccgttatccgatttcctttccgcctcctgagacagccgactaatcacggacttatctccgcaacctaacagaggctgggagcccgacaaaagtaaaacagcgtgctatgaacacgttgttacctctgcgcggacagcgccgccacagagacacttacgcattgccgcatgtctttgtagatggattctagcgtcgagcgcatactatgcaattccgtcttaagtccgggatagacgtggtcgcctgcggggaacacgatctccagataccgcctcaacaaccagtccataacgctgcatccccaacagcctttgaccaccgtaccgtcgagccacacggagtagtcgtcctcacgttgctacaagaggaaaactacgtcacccgacacgcggaaaagaaagaccgtcgcaataaaccgtacctacgtgacctaccaacgtaggttttactcgatgaaaggtgacgcggagatcttgcaatctggtcgcgtaatcctctggacgacactgcggctttgtattctttatcgtcgtcgtcgtcgccggcttcgcctcctcggaagcgcctagaaaaaagacgatcaggaccagagaggaagagaccatcaccgacagcatcgccgcagcatgccgccccagtccgccacccaactgcgcgtcccaggtaggtggtcctttatgttatgatgtttttgtcaatttttttttttcaatttctttcttccgcggttagaatagtttctgtaggaaccaattatcaatctgacgggttatcgtcaccacttgatggcaaaacgaaatttttttttttcattgccttgaagtctctcccgccaccaccaccaccgccgttatctccggctggagatcaagacgaaattcctcctctcttaaaaaaaaggtggtgggctcaattgatcatggcaagaagaaaaactatactgaataaactgtgtgcaaaactactagtaacaacaaaaatagcgactagatacaccacggacaatctcagcagatactctctcaaaagaaaaaaagacgccgtaacgtcggagaatctggtatctactgcctgacgaatttttttttcgtccatgtatgtgattacgagtagtagtggtatgtagaacaagaagaaaaatcgtagtccccaaaaggataataaaaataacactcatagagaatcacagattttctctagacaactctctatccaaataacgaatgtgaagcgtacaaagtaagatattcaaagaatagcaccttcatagattcatttcagctttctactccttgtaatttaaagttgcactaaacaaagctcttaaagaaggttcgagccgctctcgatcactcatcgatcacgcgagtcttattattccaccacaacgtaacattcttcactttgtagagacactttatcgtagagtaaccctcgatttcctagctgttgttttttgattattttgttcgctctaagagagatactcgaaatcctacttacaccaaggaccctacatcatcgcaggaagaataaacataccgtagaaatctcgacacgcaaacgcgaatgtacacgaaccaaaagccacagacccactatttctgtgccgtatttttttttgacaatctgtctgaatctgcggaaatagttacggagaagcaattctgttaaaaaattcagtacgttagcagcaaaagataatcatttcgtgtgatagcaagtaaatcacctcacttaggatcgatttcgtgcgaaaaaattattttttctcctaatcaacagataatatggttaccatttagagtagtgtcactttactttcacggaagatgcaacccccgagaaaaagaagaatcgatcatagataaaagaaatcaagccagacttgttaagaaaaaaaaaagatcaaaaaattactacctaaaaagaacgcctagccattgggagacgcgcacgtctgtgtggtctccgcgatcatgagaacgaaaaaaaaagacacgacaatacacaggctgacctttgaaaaccaagcctattgataataatctaccccatagaacaggatataatcaagcatccaaacaacaaacagcgccgccgtgcctcctccagaggacggtgacgacgtatgtctgtcgtctcccttctcgctctggcttctggggctctcctcctctccccatcatcttctccttcgtcccagacggacggctatcggttcgcgcgctcgtcttttcttcgatgtgcgcaggtttcgtcatcggagaagaagaccgcgaccgtatcataatgatgatgataataataatacattcaccgaccatctttatcctcttttgttgttccaaagagaaaagaaaaaaaaaacaagcagccactctaaccatcacactcacgagttaatatggggttaggggggaggaagagaaataccgccatgaaggcaagagcagcagcagcaacgacgtcactacgatgattgatgatgatacacgactaccactggaggagaggaaaacggagaaaactcatcgtgatgatggaaacaagaatgatgataataatgatgacgataaagccaccacacgatatatacagagaacaacaaaaccaccaccacgacgatgaaacaaaacgctcaaccaaacattgtgtaaccgctacgcgtccgtggccgcggccggcggcctcttgtcttgtttttgttgtccccttcgcgggggacatcatcgccgccgacccgcgtgtgccctgcctcacggctggtccgtgatgaactcttgctcgtaaccgccaagcgataaacaagccaccgtgatagaagacaccttataagaccatatcctagttacatagtagtgcatatatatagtaatagtagaataagtgaactttagacacgatagatgaagccatagtctgaatagtcatgatgttaggaacactatacgactagtacatacatacatacacccccttaggaggaacgatgaatcaaagaataatacatcatgtagcataagtacattaagcctttaaacgaacaaattgctaaccaaaatcgatcaccaccatagacgtactatcatcattacaacgaaaaactagacggatggatagctgtaagtctcacctagctaactaacgatcacattttttctccacgatatagtcaccacaaccatgaatgatagccgcctatttgaagtttgatatctcgatgaatctctatagtcatagcccgttctttttttccaagtatcctttagtccataagcattattataaccgtattacccagaaatctttgttatgagtctcttcgctgtcaactgattagtagcaagttgctgtgattttttttccaatcccataggcatccttagttaaaacattaagaagtaagtaggttctggatagctaatcatcttttttttttacttcggtagattaaaacaaatgaaacacgtagctgttgttttttggtgaatatagtttggtaagtccttagcgggtaagttctaagaaacattagttactttttattgttctgtctcctctccccctaccttacgttgggaggtagcttcgtcatgtaggataataattaggtaagcaaacaacatagatagtgattttagtatagataactcgtgtaagtgttttagtgacttgtaactcgactcggtagacttctcagagtttcgcctcacacaggcgggtacactcgttaagaaacgcaaaatacctaaaagggtacgttacatagcagataagttgatagatgaccgatattatacttcattaactcacgaagatgactgtaagtaaggatattgttgttcatgatagtagccaggttataaggatcatatatatctcgtcagggaaatacaagttagaccataatgttgactactttagagataataagacaccataggattctgaatttaccatgatataagttaagaagattgatatctgtcctttttttgaaacgaagataggcctttttattttttcgaattcatgttcgaaaacacaagcttccataacaagaacccgtaccgaagaaaagttccatcgactaaaaagaaaaaagaaaacgaagcaagacctcgacgacaacaacacatcaaagaaagacgaccagctgattatgttcttaggaattccacacacccgcgagccgatccgcaaacgtcgtgcgaggcgcgctttctctggctcgacacaatgatcacaccgcacgctatagacacgtcgtcgtggacgacgatgacctcaggccacgaatgacaaccaacatgggcaaagtccaattagccaaaaagacgacgattctaagaattgatgaatcctcgatatacgcctatcgataggtttcaattgtgtcatatacatcaaatgaaaaacaggacgcacgataaaagcttccttacagcataactgtaacatacgatcatcgaacatctcctcacatacctttctcctctcacataggaaaacaaaactctttttttttctttcctgtcaaggaaaaaatcaatgtaccaccacatcactttctgctcggtcccggcgacggatgggcgcgcacgcggacaaagacccaccggccacttccacttattttttattgttaatcgtcttctcccccgcacgcggagcaccaccaagcctagctgctcattcgctcaaccagtcacaccgcgcacgcgagaaggggccggggtccgcgggcaccgccgccggaggcgcggttccctctctctaattccctggaaaacaagtaatgacaaacaaaaagacgacaaaaggtctctattctgctacatgagagaaattatagctgttggcaatttttcaaaatacatgttataaggcatcctctctgccacacgcgcagtcacggataggatcagtgcgtattcattataaaaaaaacacaaacaacccatatatgtgaagcagaatgatgaccgaccgcacggagcgacgccgtcgactgacccacgcgggatgtacgccgtccgcgaacaaccaaaggacgacccgtctccccccgcatccgggtttttctcttggtcgaacccggcttgcgacgacgggttgttgctttaccggacgacggtcagccgcggggttgatacccagcgacggcgtcgctcccacccgggtttcttctcttgtaggtaccactcgtagactgtcagccttacgaggagacaccgcggaccggggaaacggataagtttacgaacagaaatctcaagagaaagatgctgacccgataagtaccgtcacggagacacggtggtttttattgaatttccagtgtatcgagccaccgtgatgcaggtacggtggttttatgtgaagtgccgctatctataggcgatgtgttccctgacggtgtgtgtttttttggggatagacaacgtggttcttgtacgtggtttttaccctgctcaataaagtcacgttttccttacacggtgttgtgtcaaaaaataagcgtggtgcgtttgtctttgagcgcgcgacagatatagggggtgatagcggtgttcttctcatagggaagtcgcaacgggttgacgttcatcatgaggtgctcggggtccgtgactcgcgacatggccacgtagatgtggctcatcttgaggttcttgggatggtccccaaagtccacggccaccttctcgagcgacaggccctgactcttggcgatggtcatggccgtgcgcgaagtgaggccgtagtccacggtggtgcacacgtgcagactcttgccctgcgccgactcgacgaagcgcgagacgttaacgtcgagcacaaagaggaacccgagcgcatcgcgtagcaccagccgcgaaagaccgcgctgcaccacctcggggtggatgcggtggcggtcactgggcagactgagcacgttgtcgctggtgtagccctcgagcgtgtacgtctgcgccggcgacacatgcgaaagcatgcccacgaaggagccggtctgcgagctgatctgacagttggccttgaacaccacgttacggcgattgtaggtaacgagcggcaacgtggcgaagcgaccgcccgtgagacgctgcatgagctggtagcgcttgagaaaaatgtcgcggaaggtagtgtacatgtgcaccgtctcctcgaaagaaagcagcgccaggctaggtggcttgacgtatttgagaaaaaagggatccgcgtacagactggtgtgatccatgagttcggcgtccgtgatggcgtccgagtcgtcatggtggttggacaggcaggggatgtcgtgggtctcctcttggccatgttccatccgttgagataccggcacgctctggccgccctgagaagaatccgcgtcgacgtgattatttatcggattctctcccccgctccaagcgggagcggcggccgtggcggcggcagcggcgcagagcgaactcacgtcgggcagctcaacgcgcgccagctcacgcaacatctcctcggtcgtgtagggcgacacgtaaaagtagtacatggccgagaagagcaggcccgaaactaacgagtaggcgtaggccgcctgctcgcagggcgtgcgttcgataaacgtgtccttttgcaagatgtccacgaaacgttcgaccgtgccctggtatccgataacacaggcccgcaccttagagttgactcccaccgaactgcccttgatgtaggtaatgcgcaaggtgagcagcgtctcacggctatcgggcgcggtggtggtatcatcgtcctggaaaaacgccgtctcgtcgttgccgccggtgctcccgattacagatcctccccctccgtgagcctggacggaggggttgttggtggcaacgacgtcggccgcggggcgcagcgcctccttggtgatctcgctggagaggttgtggtcgacaaactgcgagtagttaatgatgcgcgccaagttctggcggaaccagagctcgacgggctgcggcgagtcgcccagcgggtcggccagctcgcagagctcctggtacgcgcggttgttgaccacgcagtagacgggcaaatcaaagagacggtggcgctcgctcaggcggatctgctcgtgcagccgcttgaagtaagcctgcacctcgacgtgcgagagaaaaagccgcgtcatctcggcggcgtacgagggattgcggatggagctgggcggccgcacgaagcggtccacgtaggccacgtgctcttccttgagcgggataccgaactccatgtacttgagcaggtcgccaaagtccaggtcggtgcaacgcttgttgtgaataaacatgacccagttgtcggcgatgtcgcagtagttgatgagcacttcgttctgaatcagcgccgagagcacgtcaacgcccttgcgcacgctcttgttttgcgtgtagtggtcgtagcggctctccagcgcctcggtctgcgtgggcgaaccgacgcagatgatgcagggcacgcggcgttcgcggtaaagtcgcgtgtcgcccagggcgttgtaaaagtagtaaaaaaacaccaccacctgcagcatgtagcgcagcataaggccgcactcgtcgatgacgatgatattgctctcgcacagctccgagaggtcctcgcaggcggcggccgcggccgcggcggaggccgaagcggccttgcgctcccacatatttaagcatttgtccacgatgtcggcgatgaccggccagtaggcgagcagatcgttgatctgcaggcgctggatggtggtctcctcgtgcggctcgcacacgcggtagcgttccagcgtctcgtggctaacggcgctgtcagccagcggcacgtgcttgctgacgaagccgaagacgcggtagatggtcttgacctgcgccgagcgagtgcggttgaggatcgcgctgaggttctgcgcggcgatcaccgtggtaccggtgatcacgcaatctagattggccgccagcacctggatgctggaagtcttgccggcgcccgccgtgccggtgacgagcagcgcgcggaagggaaagaagggccaacggtcgacgcagggcacgcgcgtgccgccggcctcggacgaagcggcagcggcggcagaagaggaggcggaggagtgaacggtcgccgttgccgcggtggtagttgcggcagaggggttgttatctgtcgttcgttcaacgcgactgatggagcgaaaccactggaacgaaaaatcctcgggcgcaaagcgctcgcgcgagagggacttgaccttgtcgacgatccgttcgatcttggcggccgacgagaggttgaggatcaaggcgtcgtcgtacttgggcgtgggccgcggcgtggatgacgaggccgtcatcgacattttccccacgggccagacgatgagcttcctgcggttgctgcacggctttctggggacgtgtcgcggccagagcatgcaccaggtgctgcgcgacccgtgcgtgctgcgcaagcagctgctctacggagtgtgcaagacgctctttgacaccatcacggtgcggcgcgtggccgaggagtggaagttgcacgcggcgctgtttccctaccgcgcgctggacgaagaggacctggagcagtatctgttggtgtggagcgcctcgttgcgccagagcgtgcaaacgggcgtgctgggcgcgctccgcgacattttatatcagtacgccgataacgacgactatggtctctacgtggattggtgcgtaacggtgggactggtaccgctgctggacgtgaagaccaagccgagcgaggcggccgagcgggcgcaatttgtacgcgcggccgtgcagcgggccaccgagacacacccgctggcgcaggacctgctgcaggctaacctggcgctgctgctgcaggtggccgagcgcctgggcgccgtgcgcgtagccaacgcgcccgaggtacgcgtcttcaagaaggtgcgctcggagcggctggaggcgcagctgcgcggcaagcacatccgcttgtacgtggcggccgaaccgctggcttatgagcgcgacaagctgctgttcaccacgccggtggcacacctgcacgaggagattctgcgctacgacgggctctgccgccaccaaaagatctgccagttgctcaatacctttcctgtgaaagtggtgaccgccagccgccacgagctcaactgcaagaagctggtggagatgatggagcagcacgaccggggcagcgacgccaaaaagtccattatgaagtttttgcttaacgtctcggacagcaaatcgcgcatcggcatcgaggacagcgtcgagtcctttctgcaggacctgaccccctcgctggtggaccaaaaccgtctactacccgcgcgtggtccgggtggacccggcgtggtgggacccggcggcgccgtggtgggaggacccgcgggccatgtcgggctgctgccgccgccacccggcccggcggcgcccgagcgggacatccgcgacctgtttaagaagcaggtcatcaagtgcctggaggagcagatccagtcgcaggtggacgagatccaggacctgcgcacgctcaaccagacctgggagaatcgcgtgcgcgagctgcgcgacctgctcacgcgctacgcctcgcggcgcgaggactccatgagcctgggcgcgcgcgacgccgaactgtaccacctgcccgtgttggaggccgtgcgcaaggcgcgcgacgcggcgcccttccgtccgctggcggtggaggacaaccgcctggtggccaacagcttcttctcgcagttcgtgcccggcaccgagtcactggaacgcttcctcacgcagctgtgggaaaacgagtatttccgcacctttcgcctgcggcgtctggtcacgcatcagggggccgaagaggccatcgtatactccaattacacggtagagcgcgtgaccctgccctatctgtgtcacatcctggcgctgggcacgctggaccccgtacccgaggcctacctgcagctctccttcggcgagatcgtagccgccgcctacgacgacagcaagttttgccgatacgtggagctgatttgcagccgcgagaaggcgcgccggcgccaaatgagccgcgaagcggcgggcggagtgccagaaaggggaactgcctcgagcggcggcccaggaacgcttgaaaggtccgcgccgcgccgcttgatcacggcagacgaggagcggcgcggcccagagcgtgtcggccgatttcgaaatggaggccctgatgatccgcggcgtgctggaggtccatacggatttcactagacagaatgtgatgatcatggagccgcaagtgctcgactttacggtgcgcggcgacaagctgtggctgcatacggagcacgggctgctggtttccatggccgagtaccgcagcgagttgctgtgcacctcggcctttctgggctactccgccgtgtttttgctcgagaccgaagacgccgtcacgcaggtgaggctctcggatctgcggctcaaacaccgctgcggcatcgtcaaggccgacaacctgctgcacttcgcgctctgtaccgttatttcatgcgtggaaaattgcaacttaacgcgcaagtgcctgcacgacctgctccagtacctagacgcggtgaacgtgcgcgaaagcttcggccggctgctgcaccacagcgcccggcggctgatctgcagcgcgctctacctactctttgaggaaaaagaaccgcacattgtgcagtacgtgcccgctaccttcgtgcttttccagcagacgcggcatacctgcctgcagctggtagcacgcttctttttccgccttaccggtcaagacgaggcacactcgtttagcctcaagctgaccgagcgtaagaccgtggacggttggcccgtgggcctgggcctgctagacgtgctcaacgccaactaccccaatttgccctcaccccccaagctgccaccgcgctgggaacggggagaggaagagtgagaagcgaactagacacgcatatcatagaaaaaaaaaaaacacgcaacacgtagtgagctttgacgtcccttttactagtatccacgtcacacgctgagaactttgacgcactttttttttactagtatccacgtcacttacccgcgtagttcccctacgtgactcgttaagcgttgagccggaaaaacctcaggccctcggaagccacccgcttagcagcgtgttgcgcgtcaaccgccagcgaacgcacccactcgtcgcgctcctcgagccaagtcgccgacgaagaagaacaagacggaggagacaccgtcgccgtgcccgaagaggacgaagtgacggacggcaaggcggaggagagaacggaagaagaacaagcggtggtagaagcggtggaggacgacaataactctcgcgcccagacctccacgcaagccgtgagcatggcaaaagccttgtccacatagacgccgtagccgatatcggccgctaacgccgtatcgcgtgactgtacgatgatctggccctgctcggcccacacgccgtggaagggcgcgcagtcaatcaccccggcgtgcggccttacttcgttttcaccgggctggaagcgcagtaaccaaaagtccacgtcgttgcggcgagccacgaagcgaaagaggatctcgcggtacacggcttccagctcggacacgctcacgcgctcccgtaacagcgccggcagccggcccaggacatgacccacggccgagagccagtcgccaccggccgcgcagcaacagccacccaacgccgcgggcggcgtggagggagaaacccgatcactaccgccgttatgaccactcccggcagcggcatctagaccgccgccactcgcgtggtccgcgtcgcccacaccactaccaccgccgccgccgctagaatggcggtgagtgacgacgcagcccgcgcaacaagcgccgccacaatgtcccgccgcgaaaccacccaccaccccgtggagcggactaccaccggcgccgccgttgccgtagaagaagttgaagggacccaccaaccgctcgtcgccccagaccaacagcaccccgggcgcgctctcttgaacacgacaggtgggacccggatcgtcgccgccaaaaagtttgcgccaataacagtcgaccacagtccgcacgcacacttcggccgagacgggtccgtgacccgaatagccgtcgtatacataaaactcgcggtggccgcgcgacagaacccacaaaaggccggccgaagcgcaggctgacgtaacgtgctcggagatgtagcccagcagactctggatctgccagaaagcgcgtcgcgagcgaaaacgcagattctcaataaacttttcacaaaccgcataagtgtggagtcgatgactataacgcacgtagggattgaagtcgcgcgcgcgtacacacttggccagcacgcgctcgaccaaatccacgatgagcactcgatgtagcgtggcgtcgcgaacgtgcacggtgaaagtggcgtcgtcgctcggcgggtgcgcaccgccggtgctgctgctgacttccacgacgttgttttcaccgtcgccgtcgtcacgtggcagcggcggcaacagccagcgacgatcgccgccggccggtcgctcgcgaaaagccgtggcattgagacgcacggcgccgccgccggcctcggtaccgaagacctgccactcatcctcaggcacgccgagcgagagcgcgcagggttccacctccagcttgccggccgagcccacgatgtcgggcaggccgcaccacgagagcacctcagccgccgcgtccaacgccgtctcgcgcattaacgtgtgcagaccgtggaccgcgtagacgggcacgggcgggaaaccgggaaaaaagaaagaacgggcggcgcccgtctcaaagaggtccggccccaggtagtcgcgtagcggcggctgcccagcgaaaccacggaaaagcacgtcgtaaaggtgagtccaggccgactgcagcaataaacaacactgctcgtcggtcactgccacggccacgaaaccgacaggcgtgaccagacgcagacaggtgcgcaaaaaacacacctcgcgcacctcaaagaggcgtgccaggacggcctcgtcgtcgcgctccagcacatacttgtgagtgccgacgcgaaacgacatggccaaatcgtaggcgtagtaaccgcgacgcaattttttgtgcgcgtgggtgccatactcttcggagacgcgttccgcggcatgcgtgaccacacgcggctcgtgcacttcgggatacgagccgatgaccactagcttggctacgtggaaaagactaagcgcgttcgacagcgctgcggtttccacgcccagtgccggtgcggcctccaaaatctccacgccactagcgtccgtctgaatctgcaccggcgtgaaggtgcgcgccaacacgcggattaacgcgctgccttctagcaacacgcgcgccaacacggcgctacgctgctctaggccgcgccgacgctcatcggcgtccgtagtcacggccgaggccagcgcagcgtagctggcgcgatgcacagcacgcacctcagccggcggcagacggtcaccgcgcaccacgaacgtgtgaagccgcggctcggcacggccgccacccagatccaaaaacagacattgtacgataggcaccgaggcctctagaaggccgtaccagctgagatgacagctggtcccgaacagggtgtacgggtggtggcggtggtgcagcggcggctgagcggtcatcctcggacagaagagagtcgcgaaggcccgcggggtcttttttcaccgaccgcccggacgtgctcaaaccgcgtcgtgagccgcggcggctcccatcgtagtatttaacgacccgcgagcctgtcgtcatcggcgcgcccccatcgcctcccgagcgagcgggccgccgctatcgccatggccccctcgcacgtggataaggtgaatacacggacatggagcgcttctatcgttttcatggtgctgacttttgtcaacgtcagcgtgcatctagtgctgagcaattttccgcacctgggctacccctgcgtctactatcacgtcgtggactttgaaaggctcaacatgtcggcctacaacgtaatgcacctgcacacgcctatgcttttcttagactcggtgcagttggtgtgctacgccgtgttcatgcagctcgtctttttagccgtgaccatctactacctggtatgctggatcaagatcagcatgcgcaaggacaaaggcatgagcctaaaccagtcgacacgcgacatttcgtacatgggcgacagcctcacagccttcctcttcattctcagcatggacacgttccaactattcacactgaccatgtcatttcggctgcccagcatgatcgccttcatggccgccgtgcactttttctgcctgaccattttcaacgtgagcatggtcacgcagtaccgcagctacaaacgctcactctttttcttctcgcgtctgcaccccaagctcaaaggtacggtgcagttccgcacgctcatcgtcaacctggtagaggtagcgcttggtttcaacaccaccgtggtagccatggccctgtgctacggcttcggaaacaactttttcgtgcgtacaggccacatggtgttagccgtcttcgtggtctacgctatcatctccatcatctactttttactgatcgaggccgtcttttttcaatacgtcaaggtgcaattcggctaccacctgggcgccttctttggactctgcggcctcatctaccccatcgtgcagtacgataccttcctcagcaacgaataccgcaccggcatcagctggtcgttcggcatgctctttttcatatgggccatgtttacgacgtgtcgcgccgtccgctactttcgcggacgcggtagcggcagtgtcaagtaccaggcgctggccacagcctccggcgaagaagtcgctgcgctcagtcaccacgacagcttggaaagccgtcgcctccgcgaagaagaggacgacgacgatgatgaagacttcgaggacgcttaaccccgccgccacccgcaccagacttggagacatggacataaaaaagagacacgcagaccgtgggtcgggagcacatactttttttttattaaaggtttatctgttcttccaccagctactttacgtgtttcaaacagcacattagacacacgggggcgcaaacacacacaaaaaaaaaataatatacacacggagaaacacccacgggtgtcccattcccgactcgcgaatcgtacgcgagacctgaaagtttatgagttaaaagggcaaggaggcggcgggcttttttgtcccgggggtgggtggacgttgtgaaatcttcttttggcgcggagtcctgggtgtgtcgggccgcggcagtcgcttagccaccacctggacgggggggaccgggggcggggacaggtaaattgaggtgtcctcttcgtctaggtcgtccgtctcctgcataatggagctttgctgatggtggtgatgttttgagggtttctttttcttttttgactgcttgctcggtttcggagccttgtcctcgcgaaacgtcgagcgcaccgcgtttttcttggagccgtcgtgggtggcctcgcggtggctgccgctactactgtcgtttcccccgcagccactaccgcagagccgcagcttctgttgccgctcctcgttatcgtcatcctccccgtcgtcatcgtcctccccttcgtccgaggaggaagtcggagggatgttgtcgtaggagcgtagagacacctggcgacccagagcatctttcaggggctcaccgggcgtggtaccgaactcacaacatattcgtttgcagagttcggcacccatatcggtaggttcgtcttgcgggacaggtcgcgactccaacggtctagcacggtagagacggcatggcgcgtaaactgagggtcaaagaccacgggcgtgacgatgagcaggagcgggatgtggtcgcagtggaaaacgcgaccgccggccagcaactcgcagcccagttcgctttcctcgcgctcgcggaagatggccgagaccaggtagacggtaggcaggtcgcggaaatcgatccgctccgggtccggatgcttctttatatagtattggctgagcacgtactgctgaatgagcatctgaaagtaatactggtgacgcggattgacaaaagccggcagtgaaaagcgcgctacctcgtacacgttgagccggcccagcagctcgggcgtgttttcgtcctcgaaaggtatcggcggcggcgaatcgcccgggctgccccgcaggtggtgatcagcgccgccgccagcggcgtcgcccgcggctaggccgagactcgcgttaatagtgatcgtggcgtccccgtcgctgttgtcgtcactcaggtgcttggcgtcaaacacgatcacttccgaacactcggccttattgagatacagcagatcggccaggtactcgcgcagcggttcgggcggcttgagcgggcgcgcgcgcttgagcgtggccctgaagagcgccgcgtcgtgcgaaagcagaaactcgcgtgccgacggggtctcgcgttcaccgcgaaactccacgcccggcaccgggtgtgactgcaacagcgaggccacggccgccgcgtcgtgcctccgcagcacgttctgcacaaaggggtcctcctttttgcgcaaatatttgtagcggcacttgatctcgtagacgcgcgcgcacggttccaccagcaaggtgcgaccgctgccctgcttgagcacgccgaagcacaggtccatggaagcgcccagcagccccgacgtggggtcgatgagcagaccgaggccgtcgcgcaccggctcgcgtccgtgcatcacgtaacattccaccagcgttttgactaagccctcgtgtttgataccgaactggatgcccggcgagacgccggcgcgcgagcccgtgtagtgcgagccgccgccacccgaaccgtccgccgccgcggcgccgggcagacagccgctgacgaaggcctcgtagaacttggtggccgagaccgtgtccatacgcaacagatgccacaccgagttgcgcgactgtccgcgcgattccttttccagcaactggaagagctcgacctgccgatagttgggcgccaaatccagcaaccggctgagccacacgtagtcgtccgagccgccgtgccggtcgtcgcaccgctcggccacgcgctccagggcctcggcgatctcggcgcgtgaggcttcggcggcgtgccgctgacccaaaatgtcgcgcagaccctcgtcgcgagccagcgcggccacgcgcgtcataaagtcctcggctactggcgtaccgtgggcccgcagcatcttggcgaagatgcggtaggcgtaagacagacgcagcaccgtaaagggcagattacggaagccctcctggtgcagcaaaaaggtgttcatgagaaagagactgaggggctcatcgtcccaaaccgccagcagccgggtgagctcctcatcgtcgtcgtagtccaaactcgagacgccccacatgatgatggcggcgcctcggtattttccccgccggtgggtttgtaccttctctgttgcctttcccctcagcaaccgtcacgttccgcgtcccggttactcggggaacagttggcggcagtcaccgtcaaggtcctcctcgcagattatgctggtggtgcgccgaaaggcgttatataaatacagcccgtcgctcgtggccaacagacgctccacgttctttctgacgtattcgtgcagcatggtctgcgagcattcgtggtagaagcggcgaaaggcgcgtacgcgacacgaggacatcttggcctccacaaagcgcagcgtgtgcgacaccagcgcggcgccatgctcgcccaggagacaggcgccgtagctcatttgcgccgccagaatgagcagacaggcgtcggagcagtgcgtgagcttgccgttctccaacgcgcggcaggccgcgccggcgtgcttaaagagcaacgcctccgtgcccatgcgcacctcgtccagaccgcgccggtccaacagccgcatgaggcaaaagcccagcacgttacccagcgccgacagctccgacatgcaataacgccgtaggccggctacggggaaacgcgcgtgcgggtcgcagatgagcagcttctgcagcggcatgggtcggaaagcagggtggtaacattcgcgcagacggtgcgagcagttggggatgcggcgcgccgtgcccgtctcctgaaagacggccacacagcgctcgttgtaatccggatagggctcgctgaggctgtaatcgcacagcgcggcgcgcacgatctcgctggggttgtgcgggttcacgtcgatgagcacgttcatgggtgtaatgtcaaagtggcatacacgacactggtgattgagaaatttgatagcgtcggccaacgtgcaaaaggcacgtcggtagctgtcgatgcacgccagcttccactggtcgtgatgaaacatgtctgtgtggaaacgtcgatgtaccgtgacgttgtgcagcagacagcagcccgtggccgtgagcagaccgcggtgcacgcccgtgcccaccagcgacggcggctgctgttgctcgccagcggcgcgcgtgcggatcaggcccgacatccagaccgtgagcaccgtctcgctgtgcttacgcgccaccttgaccacgcgatagcgatcgagcggccagacctcgccgaaggagccctggcccaggcggtagctctcgtcgctcatgtccacggcataacagatcttgtggcaaaaatcgtcctctttgggcacgtagaccagcaggtaggagatagagagctcgcagagctcgggatgcgtaaggcgcaagaacatacgtgggtcgcacgtaaggccgcggatggacgtggtgatgatctggtcgttggaacaggtgcaatgcacgtcgtcgtgtgacgtggagtcggcctccaccgccgtggcggattcctccccggaactaccgctgagcggctgcggaacgcggcccgggcccgatgccacggcgctgtcctgactttccgcgcgcagctccacgtcgttttcttcgagcaccgcgtgcacgccgcccacacgacgtcggcacagcggggtgcgggccagcgacaccaacggcggacgcaacgggcgtttgcgtccaccgcggacgccgctcacgctgtccgaggggtcgctgccgccggtgaagagagcgcggcgtacgctggtcacgtcgccgtcgcgatcgtactcgaacgaccacatggccgaggtttcgcggcagcgcaagccgtggtaaccgtcgccgctggcggcgctgccgcgagacgacgtggacggcaccacggcccgacgttggttctccttgtccgaaaccgcgtcctctttttctccgtcacgcatcacgtcacttcgaacgcatgcggaaaaagtcgcgtgtccaagcacggtggttgtgctgacggaactcagggtggtcaaagtggtgacgccgtcgccggcctcgtcggccatcagatccacgacctcgtcttcatcgacgtgagcctgggcaacctgagcggcggcggcctgcgcggcctgcaccgcggcttgagcggcggcctgcgcagcttcgcgcatccactggcgccggcgcgccctgctgggacgacgcaatggcggcggatcccagccctgagtcgtcgttccgagcgaggccgagcgagcccgagaccgaagtgcggaggacatagtggcgacagtcttccctgttcctagggctgcactagctaccacaccgacactgtcgttatgttgtgtttttttttaataaaatctgaacagaggcgtgacggggattgctatacctgttagacggcgtcgtcgacctccaggtccaaatcgcacgtcgccgaaaccgagtccaccaaggtggctctcacgtcgtctaccgtgtccttcagctcggttaaagagtccagcgcgtcgtccacgttaccggattgcagctgtcgggcgcgttgcaactcttgctgcacggccgcccgttgctccaacaggtgtgcggccacgcactgcgtcgttcgctgactgtatcgggtctgttcccgagcggccacacgcatcaccgtcaaagcctgctgcgtggtgagccggtgctgcggtccgtaggtacgccgcagaaactgatgctgctgtcgctcaaggtcgacgcgcatcacgtcctttaagagctgtttgttgaccgacgtcatagattcaacgtgatgagacccgcgtcgttcagcgagagagcgtccagcaacttgccgacgtggtagacggggaaaagggagacggtgctctggccgggcaagatgtgactcaaagtgacgtcggtgacagccgcggcgcagtcttggataacgatggggctataactcacggtccgcgcctcgtcacgcgcgagatctaaacagagacggttctgactgtagagcgcgcacaacaaacaggtgcgcgacgaggccggccaggcgggcacctcgcgccccgagaagcggccgcgcaccgcctgcaacacctctctgagacggtccagcgagacgggctttaaaggcaaatgcacctcgtcgccggcgtcatcgacccggcctgctgacgcgctcgtctcgaccgcacaagcgccggccccgccgccgccaccactaccaccaccaccaccaccaccaccaccaccaccaccactaccacccgccgtcgtcgcctgcggcgtcggcgcagggaattcgtagccgcgataccaaacaaagacgtacagctcagccagattcatgtaggtcatatagtcccgcacgggttcgtaaaagagtttgggcaacaacgcggggaaaggacaaccgttcttttcgcggccgaaacaggtgtcacgcgcgcaaaagctgcgcggtccacagtacagcagccacagcagggcctccacgtcgcacacgttgtgatgatctaacaagcccggcgtgtacacctgtcgcagcacggcttccacgtgttgcaccttgttgctggagagtgacagctccacgtgagccttgcgatacaacaggtaactgccgtagattaattcgccgtcgtaagtaacacggtcagcattacgtaacacataatcacgcacacaaagcgacggcaaaggctcagccgcggccgcgaaacgctccagcacgtcgtgtcgacgtagaaaagacggcgtggcggcgtcgtttttcggagcgcgtcgtctacgacggcgtttggcccgagacccaccgccgttcttttcccccgcggatttattcccgacgtttttctttttgtcctccggcccgctatcgccaccgctgctactgctatccaacaccggcacctcggccgactcgcgcggaattacgttagtgaccaacaagaaattctcgtcgggcgtttcaattaggcgaaagcgatcgtaaggtgacacggcctcgcaggccaccagcgccatatttacggcctcctcgaagcgccaagcctcggagaccgagaaatcggcggccggagactgcgccgacagctcgaccatccgttccaccgagcacagggacgttgaaaccccagcggaccccggagacctgacggcagttgagggggaggagacggggaaactgagaggagaggcggatgaagattcgtctgagcctgacgccgaggaggacgacaccactagggacgacgaagacgaacgagtgacggcgcccgtcccacaagccacgtccgcgacaacgtggttttcgggtggatcctccgtcgtcctcgcggacgccatctttttcctctcctctcgccgctgccgcctaacctccgctcgcaccaccgccgccgccatcatgttgcgcggagattcggccgccaagatccaggagcgctacgcggagctgcagaagcgcaagagccaccccacctcctgcatttccacggccttcaccaatgtggcggcgctgtgccgcaagcgctaccagatgatgcaccccgaactcgggctggcccactcgtgcaacgaggccttcctgccgctcatggccttctgcggccgccaccgcgactacaactcgcccgaggaaagccagcgcgagctgctgtttcacgagcgcctcaagagtgcgctcgatgaactgacgtttcgtccgtgctccgaggagcagcgcgcctcctaccagaagctggacgcgttgaccgagctctaccgcgatccgcagtttcagcagatcaacaacttcatgaccgactttaaaaagtggctcgacggcggcttcagtaccgccgtcgagggcgacgcaaaagccatccgactcgaaccgtttcaaaagaatttattgatacacgtcatcttttttatagccgtgaccaagatccccgtgctggccaatcgcgtgctgcagtacctcatccacgccttccagatcgacttcctctcgcagacctccatcgacatctttaagcagaaagccaccgtgttcctggtgccgcgacgtcacggcaagacttggttcatcatccccattatttcgtttctgcttaagcacatgatcggcatcagcatcggctacgtggcgcaccaaaagcacgtgtcgcagtttgtgctcaaagaggtcgagttccgctgccgccacaccttcgcgcgcgactacgtggtcgagaacaaggacaacgtgatcagcatcgaccaccgcggcgccaagagcacggcgctttttgccagttgctacaacaccaacgtgagtagctccatgatgataacatacgccttgccacaaaccgtggcgagtccatgtcctctttttttttgttatttcttgtttcttctccccgtgaactgtcagaccccgttagtgcactaggttcttaagcaccggacaggaacacactatcatacgtgacacaggttcctctaccttaaccaggtcccacacatcggtcttgacgggcagccatcggccctcagaatccttgacaccgatgtgataatccaggccgtctcccagtgtgacctgcgccgcggtcttagaacctacggcacataggtacttggcgtcatcgctctcacagaaaaaagtcgcgggttcctcgttgtggatgagcgactgcgtcatgggcccacagggcacgtaacaaagacagcggcccatatcgggggtgcaacccacgtaattgccagtgggatctacgtgtccctcgtgatccgtgcaaaagctgcaacccgcctgcccgcaggccgtggccgccgccatgaggcgcgtcatggaagggatatcgcaccgattgccgcatgaggtaaacaggtcgtagcacagaatgtaaaagaaaagcgtgtagccttcgggacgcggcagcaaccaggcgccggcgccgcctagcgtcactgccttctgacaggtcaggtccatggcaccgtgacccttgaccaggatgcgcttggcttcatcctggggcaccaacatgcagacctcgtaaatcacgtcgggcgtaataccatcgcacgtcatactgctggtcacctggctaaagcttggcaagaaatcaatgctggctggacccaaaggacctccgaagctcagttggtacaaggtaggtaaatgacagatgcgtcgacgacgccgatgtacctggcccacgccatagtggccttgataacggccgttgcagcaaagacagaggatccattcgccgtcgcggtagagcaacagcaattggcacaagatacacgagccgtcgtcctccggactaaagatcgtcgaacggcaagcgacggcccgatactcgcggtgtttccggctcttgccgaccagcttccacatgcattcctcttgcaagaactgcttcaaagttctggaatcggtctcgcaaagcccgctgcgccaagccatgaagagtgacgcgcgaagagacggcaaagccgcccggcagcacccagtaaaagtccaagtctggcgtgacgtagagcacgcacacctcgggctgcgagagccaacgtcgcaggcgtccgcggcgatcacggacgatccaaagcccggtgcgaggacaacgcgccgcgcgcacttccacgcccaaatccacttgcgcgcgaacgcagcgcaccacgtcagcgtaccaagtccgttcggcgggcggaccgctctcgttccgcggtccgaaaagcagctcctgcggtttgggcgccgagcgctcgcgctggcgacgagctcgctgagcggcagcggcggcaccccggctcagacgaggcgttagcgccttaataatacagctacgcacgtccgcccgatccatccagagcgccaaggcatgacggcaaagttcccaaacaacgcgccaggacatgttccgtggcacgtggcaggcgaaacgctgtggcaacgcgccgctgtcccgtcgtagtacagcgtagatctcgtcgcgcacggcgcgaatcagcacgtactcgacggcgatgcgcgcccgataagcgtccaacgcccggtatagttcgacttcgtggtcatcgtagctcagctcgcgactgcgccaaaaggaattgacgtaccacagcacacggaggcgcacgcgatgctgcacatcccagacctcgcggagacgcgagacaccggcacccttccactcgtccgtacgcgcgacctcgtcgcggtcgtacggatcggtggcgtacatgaggtctggatttacgtccaggcgcagctgcaccaactcatgaccgcgtatcttggaaggcggctccaatggacccgcgtgatagatgaattcctcgtcgccgcgcaacaaacgcgctacccgctgctccaggttactgaatctgccgccgccgttcgcggaggaggttcctgctccgttcggaatctcaaaaaatggagtactgacggccgtctccagagaagccacagccgcttcgggcaaacggcgatccgacccattgtctaagttattacgcagtccgccccgccgacggtgattcgtggtcgtagccaactggtgctgccggtcgcgcttattcgcttccatttcttctcgtaacaggtcacgcgctaaaaactcccagtcacgatagctgccgtcgggccagaccagtctcaggtgtagcgtctgcgcgcctgagagccgattatcggggcagcgcagacccaacgtagtgaagacggcatagaacatgcgcacgcgctgctctttctctaacgtcacagtgagaccgctttgacgtaggtaatcgagcaactccagtgggcgcggtagtacacgaaaacaggcccgctgccaagtccgccgctcgcggtcaaaagcgcgatcgccgcccacggcgtcctcggcgtcgtcggaggccggtgcgtcgtcctcatctccgcccggaacgcggcccgcggatcggccagcgctgtctacattacgatagtagacgtagcgcagcgtctcggcctcctcgttactcagcacctcctggtcgagcaccaggtgtagaggcaattgctcatcgtcagcgaaccgcgcctcaaacgccagatccgaatacaggtgcgtttccatattcggaacgcatctgtttcagaagcgcgtcctcacgcttcttacgactaaccttgatgacacacgcgtcgtacttggtctgctttgagtagataccgatgataagctgaataaaaagttggctgatgacgggcaccgaaatacgattgacgttatgcatagaacggaaaaccttattaaaggtgaagtaaatactgtcctccacctgctttttgaggcggtcgcgctcgaccacctcttggatcacgtcggcgtaacggccggcgtgcgtcatgaggtagctgtacacgccgctgagcacggcgctgatgatgttgacgtcgtccagtgcggcctcctcgatgggttccaacaggtggctacgcgccaccggatagagagcttcgtataccaggcccgtcttgacgcagacggagccctcgagcgtggagacgagcgcgcagccgctgcccagatcacacaggtgcgtgcgaaagcagcgcgtgcacgcgtagagcgagtgtaactggatctcctcggtaaacgcgttctggacgtgcctcatgtcacaggcgcccgaggcgtcgcacatgacgtctgagcgtcgctgacagttttgggggcggagggaacaggagaagggcagggacgacaggtgttgcttgtctccacgacgttcacgtccgggtggctgcaggcgtccaggatgtcgttgacacactccaccgtcaggtgctcgaacacggacgcgaccagttccaagcggcgcgggcctgactcctcggcctggaaaaggaaggaaaagtgttgaaagaggcggtcgacaaagataaaaacatcctccgtagtggcgtgcgcgacccccagtcggttgagttccgccagcaacgagttcatggcggctgtggcgggtcgcgacgacgacactttcgtttttatgggcgcgcgtcacgcggcgccggtgtcggcggattggttccggttttcaggtcgcagcccggttggcacacggcgatcccgcctcacctggcggctcacctggctcacctgtccggccccacccctactctgtaggcttccagccgagcgtgcgtaatcataagagtcccttttctgtctcctctctacacagagcatccgaggacaaaacttccacttgctgctggtggacgaggcgcacttcatcaagaaagaggccttcaacaccattctggggttcctggcccagaataccaccaagatcatcttcatatcgtccaccaacactaccagtgacgccacgtgtttcttgacgcgcctcaacaatgcgccctttgacatgctcaatgtggtctcttacgtgtgcgaagagcacctgcacagcttcacggagaagggcgacgccacggcgtgtccttgctaccgactgcacaagcccaccttcatcagcctcaactcgcaggtgcgcaagacggccaacatgtttatgccgggcgctttcatggacgagatcatcggcggtaccaataaaatctcgcagaacaccgtgctcatcacggatcagagccgcgaagagttcgacattttgcgttacagcacgctcaacaccaacgcctacgattatttcggcaagacgctttacgtgtatctggacccggccttcaccaccaaccgcaaggcctcgggcacgggcgtggcggccgtaggcgcctaccgacaccagtttctcatttacggcctagagcatttctttttgcgcgacctctccgagagttctgaggtagccatcgccgagtgcgcggcgcatatgatcatctcggtgctgagcctgcacccttacctggacgaactgcgtatcgccgtggagggcaacaccaaccaggcggcggccgtgcgcatcgcctgcctcatccgacagagcgtgcagagcagcacgctcatccgcgtgctcttctaccacacgcccgaccagaaccacatcgaacagcccttctacctcatgggccgcgacaaggcgctggccgtagaacagttcatctcgcgtttcaactcgggctacatcaaagcctcgcaagagctcgtctcctacaccatcaagctgagccacgaccccatcgagtatcttctggagcagattcagaacctgcaccgcgtcacgctggccgaaggcacgacggcacgctactcggccaagcgccagaatcgtatctcggacgatcttatcatcgccgtcatcatggccacctacctgtgtgacgatatacacgccatccgtttcagggtcagctaggcacgcagcagagccaccaggtgccgacgactgacgccggcatcggcagaaacgagacgatcgtaacccaggcgcgtaaaactccccaaaggcgaaaacgtttcagcgtagtcggctaacaaagcccgggccgccgccagcgttcgcgcctgcacgccgccgtgactgcgataataacggcgcagcaccacgttgacaaggtcgttctcctcgacgcgcggcggaggaggatccaaggcctccagcgcctcctggtgcaaatgcagcgaattgagcaacaaacacagacaggcggccagcttcatcgtcttgcgatgtagcagaaaaccgccgcttgcgcccgagacggcggcatcctcgggctttccggccaacatgcccagcatctcctcgcccatctcgtcctcgtccagctcgtaaagacagacttgacaaagaaaatagttctccagacgcggcacgtcgagcaagagcagcttcttagcacccgccagccccacgcagtgctccagcagacgggcggatgaacgcggaatattactcattcgcaaacggtgataagcgctggccaccacaccgtcaaacatgtccgaatcaccgcgcgtggcactctgcaacaacggcgctagacgctcctccatctcgggcggacaaagaaccagctcctcgtgcgagcgccgttccagcaaaaaaaaatattggcggaacgtgttcaccagggcgcgcgccgccgagattcgtcgctgcaccgtagtgatcacaacgtccggcgcccaaagcacgctggtacccggccaaataacgtgtctggggccggtgctgccgccgtcgttgacgcgaatcatataaatgcccggcacgtcgtacagctcgtccctgctgtcgtcgtctccccggcgctcctcaccactcgcatcaccgtcgcgccaccgtagcctactactccccaactgaccgcattccaccaccaacttggcgcaatgggtaatgcccgtaagcgcgtacaccagatcgctatgcttctgccaatagatggagaagacggacgacctgcggttaaaacgaccgctgcaataaaaacacagctcggaagcaaaaaccacgtcgtcttcggcgtcgggcggcggcggtaacacacggcgaatcagttgcgacagcggtccgttgcgaaacgcgtgctcgcgcaccgtaccgtcgtccattaacaacgccgcgtcgtgccaacccggcgtcggacgctcctccggacgaaacgccgcggcggcagcggccgcggcttccatcatcgtgatgcaaaccgcgctcgcggcgacgtgggttcagaactgccgtcaacgctgacggaggttgggacagaagggacggaggaagatgaggacacacacaatgggggaggggatgaacacaggcccgatgtggctgcggccgccgagcacaatcgaaacaacgtctggtggatcacttcgcgcgtgtgcggcgtaccgctgatactctgcaacacgcccagcacctcgactaacactttgaggcgcgtgcgagggatcttgtgggcttccacgtgccgacacaccgtcagcacgttggcgttccggcccaggtgatccaatttgacttttttgttccgggccaggatcttgggcacgttgttggctagacgactgccgatgagcgcacaagtgtgcttgatcttggtgtgcgccgtgaggttcttgctgtagtcaaagagaccccgctgtgccgcctcaaatactaggcggtccaactgcagccgcttctctcgaccgtgcagcttgagcaggcaagcacgcagaaacagcactaactgcttggccaggaaggggatctggtacgaattgcgcagctctagttgcgtgaaaacgcggtgcagaccgtaatcgatgcacacgtcgcgcatgttcttgatgcacgagagttctttgagcagaatggcttccaggtcagcgcccgagacgcgcggcacaatggccgtagccgctttgaaccagcccacgttgacgttgttagtatgcgagatcatgcacggaaagttggtggtccagtacaccttgctgcgctccgagcggatcaccgcctggtcctccagcccatgcacgtccagcgaggagttgctgttgcacaccacggccggcagaaaaaagtgatcgatattaacgtgcagccggtacacgcccagcgagtacagaaactcggggtaggaaccgcgaatattgacgttgagcgagttgatgtagacggcgtcgttggaaacaaaggtgctgacggtgcaagcgggctccttaaaggtgtgcttgtacatcacaaaactgtgggtcatgttcttgggaagccgcggcgcgcgcacgccgagacccgacgcggcgatggacgagagcgcggccttcatattgataacgcggttggtgttgaaagcgttgacggcgatgcggtccagactcacgcccgtcacctcggcaaactccatcccgccgatgagcttacgacggcacggcgcgtaacgctgcacggctagatgtttacgacgtcggtgttcctgataggcccggcgcagctgctgccccgtaaagtcaaatggcggcgtggcgtcagtctcccccgattccagcgtctcttcctcctcctcttctcccgtctccgaccgccgttgacggtgtttacgccatctctccccgtaccgagcgtacatgagacgcgagatgatgcacacgtaacgtcgaacgcgatcggcggccgggtcgcgcggcagtgacagcttgtgacccgcgctcgtcgtcgggagcgcggtggaagacagcgcgtgtccgttcgccgaaaccaccgtcgattctgacggtgatagccgcgacgtcctcggagcgcaagaaacaccgtaaccgcggtttacgggtcggttccccgtcccatgggaccccagatcccgagctagttcataataaacgtagaaaaggtttctccacaccgtgtccgtgtcggcaaacgtgacgctaaggcgtcgataacacagtaggttgtggtgtccctgatttccaccgtttccccctcccccacttctgtcagcgtggccagtccggcacttgccgtagctcacctgtaacttgaagtacagtacctgtcgcttgaagcgactgagaacgaaggtgctcaggtggcacaccgtctgctcgggcaagcgaagcgccatcatgacgcgggcgcggtcgcgatgcagctgagccagcacgcgaccgaaaaactccgacgtcacttcgtggtgatattcaacgcccagccaaagcttttgcagctccagcagaaaaaagtcgcgtgtagcgtccaacgcgcacggcgcttgcggacgcacgttgagtccaaagagcagcttgtagtgaacctggatgcgcggcgccgcggcctcgcccaggtagccggagacggcggttacgtagtcgtctacctcgctgacactgagtacgcgtccgatttccaccatcaggtaaggatagtcgtccaggtgcaggctgaggtcgcgcggcaggcaggccatagcgtagcgttcctcggttcccgaggcgccaccgccgccaggacagtcgcaaaagaggctcggcaattctcgattccattccgtcagcgagagcaatccgcgtagcacatgcgtggccacgtggttttcgagaacgtggtaggacagcgcgcgcccggcggtcacggatccgcaacaacaacgtcggtgcacgtagagcagcggcccgcgacaaaactgcgtcgtaggtaccagatgttcaccgtggccctccacttcaccgtcgcaaaaacagggtacggccacgggtcccagtaacagacgacccagtaccagcttgacacgctcgggctcggtcctcacgtgtatcggacaggcacggtagagagccgcaaaaacagcgcgcacccgttcgacgttaacgggtcgcggacgacagaagcgggcgtcctcgcccgtcgatagctcttgggtgaggttgcaggcgcgaacgtgcacggggacgtgtaaaacccggcgcggcatagcggagccgccgacgactattagagcgtcacagccgaggcggcgcggcgcagcgccggccattctccgggtcgcgctgctttccccgagctccgacgcctcgcgctcacgccgccgccgcgatggagaactggtcggcgctcgagctcctgcctaaagtaggcattcccactgactttctgacgcacgtcaagaccagcgccggcgaggagatgttcgaggccttacgcatctactacggcgatgaccccgagcgttacaatattcacttcgaagccatcttcggcaccttctgcaatcgcctggaatgggtttattttttgaccagcggcttggccgcggcggcgcacgccatcaagttccacgacctcaataaactgactacgggaaaaatgctgttccacgtgcaggtgccgcgtgtggccagcggcgccggtttgcctaccagtcgtcagaccaccattatggtcaccaaatacagtgaaaaatcccccatcaccatcccctttgagctcagcgcagcctgcctcacgtatctgcgcgagacgttcgaaggcaccatcctggacaagatcctcaacgtggaagctatgcacacggtgctgcgcgcgctcaaaaacacggccgacgccatggaacgcggcttgattcacagctttttacagacactgctacgcaaggcgccgccgtactttgtggtgcagacgctggtagagaacgccacgctggcgcgacaggcgctgaaccgcatccagcgaagcaacatcttgcagagcttcaaggccaaaatgctggccacgctctttttgctgaatcgcacgcgcgatcgcgactatgtgctcaagttcctcacgcgtctggccgaagcggccaccgatagcatcctagacaaccccaccacgtacaccacgagctcgggggccaagatcagcggcgtgatggtaagcacggccaacgttatgcagatcatcatgtcgctgctctcaagccacatcaccaaagaaacggtctcggcgccggccacctacggcaattttgtactcagtcccgaaaatgccgtcactgccatatcctatcactcgatcctggccgatttcaactcgtacaaggctcatctgacttcgggccaaccgcatttgcccaacgactcgctttcgcaggccggggcgcacagcttaacgccgctgagcatggacgtgatccgactgggcgaaaaaacggtgattatggaaaacttgcggcgcgtctacaaaaacaccgataccaaagatccgctagaacgtaacgtggacctgacgtttttcttccccgtagggctgtatctgcccgaggatcgcggttacaccacggtggaaagcaaagttaagcttaacgacaccgttcgcaacgcgttgcccaccacggcctacctgctaaaccgggaccgtgccgtacaaaaaatagactttgtggacgcgctcaagacgctgtgccacccggtgctgcacgagcccgcgccctgtctacagaccttcacggaacgcggaccgccctcggaacccgccatgcaacgactgctcgagtgtcgttttcagcaggaacccatgggcggtgcggcgcgccgcataccgcatttttaccgcgtacgacgcgaggtcccgcgcacggtgaacgaaataaagcaggactttgtggtcaccgacttctacaaggtgggcaacatcacgctctacaccgagctgcaccccttcttcgactttacgcactgccaggaaaacagcgaaacggtggcgctgtgtacaccgcgtatcgtcatcggtaatttgccagatggactggcaccgggccccttccacgaactgcgcacctgggagatcatggaacacatgcgactgcggccaccacccgactacgaagagacgttgcgacttttcaaaaccaccgtgacaagccccaattaccccgagctttgctacctggtcgacgtgctggtacacggcaacgtcgacgcttttttgctaatccgcactttcgtagcacgttgtatcgtcaacatgtttcacacacgtcagctgctggtttttgcgcacagctacgcgctggtgacgttgatcgccgaacacctggctgatggcgccctaccaccgcagttgctctttcactaccgcaatctggtcgccgtgctgcgtctggtaacgcgcatctcagcgctgccgggacttaacaacggtcaactggctgaggaaccgctatcggcttacgtgaacgcgctgcacgaccaccggctgtggccccccttcgttacgcacctgccgcgtaacatggaaggcgtacaggtagtggccgaccggcaaccgttgaacccggccaacatcgaggcgcgacaccacggcgtttcggacgtaccgcgtttgggcgccatggatgccgacgagccgctgtttgtggacgattaccgtgccaccgacgacgaatggacgttacaaaaggtcttttatctctgcctcatgcccgccatgaccaacaaccgggcctgcggcctgggactcaacctcaagacgctgctagtagacctcttttaccgaccggcgtttctcctgatgccggccgccaccgcggtctccacgtcaggtacgacgtcgaaagagagcacaagcggtgtcacccccgaagactcgatagcggcgcaacgtcaagccgtaggcgagatgctgaccgagctggtggaggacgtcgccaccgacgcacatacgccgctgctgcaggcctgtcgtgaactgtttttggccgtgcaattcgtgggcgagcacgtcaaggtgctcgaagtgcgcgcgcctctggaccacgcgcagcgtcagggcctgccggactttatctcacgtcagcacgtgctttacaacggctgctgcgtcgtgacggcgcctaagacgttgatcgagtacagcctacccgtacctttccaccgtttctactcaaaccccaccatctgcgcggcgttgagcgacgacattaaacgctacgtgaccgagttcccccactatcaccgtcacgacggtggtttcccgctacccacagccttcgcgcacgagtaccacaactggctgcgctcgcccttttcgcgttactcggccacctgtcccaacgtgttgcactcagtcatgacgctggccgccatgttatacaaaatctcaccagtttcactggtgctgcagaccaaggcgcacatccacccgggattcgcactcacggccgtacgcaccgacaccttcgaggtggacatgctgctctacagcggcaaatcatgcacgtcagttatcatcaacaaccctatcgtgaccaaggaggaacgcgacatcagcaccacgtaccacgtcacgcagaacattaacaccgtagacatgggtctgggttacacgtcaaatacctgcgtagcctacgtaaaccgcgtgcgaaccgacatgggcgtccgcgtgcaggacctctttcgcgtcttccctatgaacgtgtaccggcacgacgaggtggaccgctggatccggcacgcggccggcgtagaacggccgcaactgttagacacggagaccatctccatgctgacgttcggcagcatgtccgagcgcaatgccgccgccacggtgcacggacaaaaggccgcgtgcgaactaatccttacgccggtgacgattgacgttaattactttaagatccccaacaacccgcgcgggcgtgcctcctgcatgctggccgtcgatccgtacgacacggaggccgccaccaaggccatctacgaccatcgcgaagcggacgcacagactttcgcggccacacacaacccctgggcctcgcaagccggctgtctgagcgacgtactctacaacacccgacatcgcgaacgtctaggctacaactccaaattctacagcccttgcgcgcagtactttaacacagaagagattatcgcggccaacaaaacgctcttcaaaaccatcgacgagtacctgctacgcgccaaggactgcatccgcggcgacacggacacgcagtacgtctgcgtcgaaggcacggaacaactcatcgaaaacccgtgccgtctgacgcaggaagcgctaccgatcctcagcaccaccacgctggcgctgatggagaccaaactcaagggtggcgccggggcttttgctacgtccgaaacgcactttggtaactacgtcgtaggcgaaatcatcccgctgcagcaatccatgttatttaactcgtgaggccgtccggtgaggaggacggcgacgaccgcaggttagcggcgagtcacctagacgcaaacgcgggcccggacgcgccacgctcgctctgacgccgcgcccggtgcagacgttgttcgtctctgcttctcctccgtcgcggccaggatttcaccgccgctatggcggccatggaggccaacatcttctgcactttcgaccacaagctcagcatcgccgacgtaggcaaactgaccaagctagtagcggccgttgtgcccattccgcagcgtctacatctcatcaagcactaccagctgggcctacaccagttcgtagatcacacccgcggctacgtacgactgcgcggcctgctgcgcaatatgacgctgacgttgatgcggcgcgtagaaggcaaccagatcctcctacacgtaccgacgcacggactgctctacaccgtcctcaacacgggacccgtgacttgggagaagggcgacgcgctatgcgtgctgccgccgctcttccacggaccgctggcgcgcgagaacctgctgacgctgggccagtgggagctggtgctgccctggatcgtacccatgccactggcgctggaaatcaaccagcgactactcatcatgggcctcttctcgctcgaccgttcgtacgaggaggtaaaggctgccgtgcagcagctgcagaccattacttttcgcgacgccaccttcaccatccccgatccggtcatcgaccagcacctgctgatcgacatgaagaccgcctgcctctccatgtccatggtggccaacctagcctcagagctgaccatgacctacgtgcgcaagttggcgctagaggacagctccatgctgctcgtcaagtgccaggagctgctgatgcggctggaccgcgagcgcagcgtcggcgagccgcgcacgcccgcgcggccgcagcacgtgtcgcccgacgacgagatcgcgcggctgtcggcgcttttcgtcatgctgcgacagctggatgacctcatccgcgaacagatcgtcttcacggtgtgtgacgtttcacccgataacaaatccgcgacctgcatatttaaaggctgagccggccctctcgcgcccgcagacaccaagcatgccacgcgtcgaccccaaccttcggaatcgggcccgccggccacgagccagacgaggcggcggcggtggcgttggcggcaatagcagccgacacagcggcaaatgccgccgccaacgccgagctctgtcggcgccgccgctcactttcctcgccaccactaccaccacgaccatgatgggcgtcgccagtaccgacgacgacagtctcctcctgaaaacgccggacgagctggacaagcacagcggctcgccgcagaccatcctcacactgacggataaacacgacatccgtcagcctcgggtgcaccgcggcacctaccatctgatccagttgcacctcgacctccgacccgaagaattgcgggatcccttccagattctgctctctacgccgctgcaattgggggaagcgaacgacgagtctcaaaccgcccccgcgacgttgcaagaagaagaaacggcggcttcccacgagcccgagaaaaaaaaggaaaaacaagagaagaaagaagaggacgaggatgaccgcaacgacgatcgtgaacgcggcattctatgcgtggtctctaacgaggattctgacgtgcgcccggccttctctctctttcccgcacgcccaggctgccatatcctgcgctcggtaattgaccaacaactgacgcgcatggccatcgtgcgcctatcactcaatctcttcgcgctccgtatcatcacgccgctgttgaaacggctaccgctacgacgtaaagccgcgcatcacacggcgttacacgactgtctggcgctgcatctgccagaactcacgttcgagccgacgctggatataaacaacgtaacggagaacgcggcttccgtcgctgataccgcggaatcaacggacgcggatctgacgcccacgctgacggtgcgcgtacgacacgcgctgtgctggcatcgagtggaaggcggcatctcggggccgcgtggactcaccagccgtatctcggcgcgcctctcggaaaccacggccaagacattgggaccctccgtctttggacgattggagctagacccgaacgaatcaccgccggacctgacgctgtcgtcactcacgctataccaagacggcatattacgtttcaacgtgacctgcgaccgcaccgaggcgccagccgacccagtggcgtttcgcctgcggctgcgacgcgaaacggtgcgacgacccttcttttcggacgcgccactgccttactttgtaccgccacgctccggcgcggcggacgagggactggaggtgcgcgtcccttacgaattgacgctaaagaactcgcacacgttacgtatctaccgccgcttttacgggccttatctgggtgtttttgtaccacacaaccgtcagggactcaaaatgcccgttacggtctggctaccgcgctcctggttggaattaaccgtactggtgagcgacgagaacggcgccacgttcccacgggacgcgctcctggggcgcctctattttatctcgtcaaagcatacgctgaatcggggttgcctgtcagcaatgacgcaccaagtcaaatccacgctacactcgcggtccacatcccattcgccgtcgcaacagcagctctcggtgctgggcgcttccatcgcgctggaggacctgctgcccatgcgactggcgtccccggagacggaaccgcaagactgtaagcttacggaaaatacgacagagaaaacgagtcctgtcactttagccatggtctgcggcgatctctaaacagaggaccctggtgatgggaaacggacactaggcgtccgcgcgatacgggattaaaacaaaaaaaatcggtggtggtgtgtgatggggtgtggtgacggtggggcttcgcctctttttttttgtaataaaaaaagacactcaataatccgcggttgtctctgtgtagaacgtttttatttcgggttccgcgtttggtcgcctgcctatgtaaggcggcggccgcagagggcgcgccgctcagtcgcctacacccgtacgcgcaggcagcatggagtcgcgcggtcgccgttgtcccgacatgatatccgtactgggtcccatttcggggcacgtgctgaaagccgtgtttagtcgcggcgatacgccggtgctgccgcacgagacgcgactcctgcagacgggtatccacgtacgcgtgagccagccctcgctgatcctggtgtcgcagtacacgcccgactcgacgccatgccaccgcggcgacaatcagctgcaggtgcagcacacgtactttacgggcagcgaggtggagaacgtgtcggtcaacgtgcacaaccccacgggccgaagcatctgccccagccaggagcccatgtcgatctatgtgtacgcgctgccgctcaagatgctgaacatccccagcatcaacgtgcaccactacccgtcggcggccgagcgcaaacaccgacacctgcccgtagctgacgctgtgattcacgcgtcgggcaagcagatgtggcaggcgcgtctcacggtctcgggactggcctggacgcgtcagcagaaccagtggaaagagcccgacgtctactacacgtcagcgttcgtgtttcccaccaaggacgtggcactgcggcacgtggtgtgcgcgcacgagctggtttgctccatggagaacacgcgcgcaaccaagatgcaggtgataggtgaccagtacgtcaaggtgtacctggagtccttctgcgaggacgtgccctccggcaagctctttatgcacgtcacgctgggctctgacgtggaagaggacctgacgatgacccgcaacccgcaacccttcatgcgcccccacgagcgcaacggctttacggtgttgtgtcccaaaaatatgataatcaaaccgggcaagatctcgcacatcatgctggatgtggcttttacctcacacgagcattttgggctgctgtgtcccaagagcatcccgggcctgagcatctcaggtaacctgttgatgaacgggcagcagatcttcctggaggtacaagcgatacgcgagaccgtggaactgcgtcagtacgatcccgtggctgcgctcttctttttcgatatcgacttgctgctgcagcgtgggcctcagtacagcgagcaccccaccttcaccagccagtatcgcatccagggcaagcttgagtaccgacacacctgggaccggcacgacgagggtgccgcccagggcgacgacgacgtctggaccagcggatcggactccgacgaagaactcgtaaccaccgagcgcaagacgccccgcgtcaccggcggcggcgccatggcgggcgcctccacttccgcgggccgcaaacgcaaatcagcatcctcggcgacggcgtgcacggcgggcgttatgacacgcggccgccttaaggccgagtccaccgtcgcgcccgaagaggacaccgacgaggattccgacaacgaaatccacaatccggccgtgttcacctggccgccctggcaggccggcatcctggcccgcaacctggtgcccatggtggctacggttcagggtcagaatctgaagtaccaggagttcttctgggacgccaacgacatctaccgcatcttcgccgaattggaaggcgtatggcagcccgctgcgcaacccaaacgtcgccgccaccggcaagaagccctgcccgggccatgcatcgcctcgacgcccaaaaagcatcgaggttgagccacccgccgcgcacgcgcttaagacgactctataaaaacccacgtccactcagacacgcgacttttgggcgccacacctgtcgccgctgctatatttgcgacagttgccggaacccttcccgacctcccacgaagacccgttcacctttgcgcatcccctgaccctccccccatcccgccttcgcaatgtctcaggcatcgtcctcgcccggtgagggaccctcgtcggaagcggccgcgatcagcgaggccgaagccgccagcggaagctttggtcgcctgcactgccaggtgcttcggctcatcaccaacgtggaaggcggctcgctggaagccggtcgtctgcgactcctggacctgcgtaccaacatagaggtgagccggccctcggttctctgctgttttcaggagaacaaatctccgcacgacaccgtagacctgaccgacttaaacatcaagggccgctgcgtggtgggcgaacaggaccgactgctggtggacctcaacaactttggcccacgacgcctgacgccaggctcagaaaacaacacggtctcggtgctggcctttgcgctgccgctggaccgcgtgcccgtcagcggactgcacctctttcagagccagcggcgcggcggcgaagaaaatcggccgcgaatggaagcgcgcgccatcatccgccgcacggctcaccactgggccgtgcgactgaccgtaacgccgaactggcgccgcagaaccgacagcagtttggaggcagggcagatctttgtcagccagttcgcctttcgcgccggcgccatcccgctgacgctggtagacgccctggagcagctggcctgttcggaccctaacacgtacatccacaaaacggagacagacgaacgaggccaatggatcatgctgtttctgcatcacgactcaccgcacccgccgaccagcgtgtttctgcacttttcggtttacacgcatcgcgccgaggtggtggcgcgacacaatccgtacccgcacctacgacgcttgccggacaacggcttccagctgttgattcccaaaagttttacgctgacgcgcatacatcccgagtacatcgtgcagatccagaatgctttcgagaccaatcagactcacgacaccatctttttcccggaaaacatcccgggcgtctccatagaagccggcccgctacccgatcgtgtgcgaatcaccctccgcgtcacgctgaccggcgatcaggccgttcatttggaacaccgacagccgctaggccgcatccactttttccgccgtgggttttggactctcacacccggtaaaccggacaaaatcaagcgtccccaggtgcagctgcgcgccggtctctttccacggagcaacgtcatgcgcggcgccgtctccgagtttctcccgcagtcccccggattaccacccaccgaggaagaggaggaagaagaggaagaggacgacgaagatgacctctcatccacaccgacgccgacccccctgtccgaagccatgtttgccggcttcgaggaggccagcggcgacgaggactcggacacccaagccggactgtcccgggcactgatcctgaccggacaaagacgtcgaagcggtaacaacggggctctcacgctcgtcatcccctcgtggcacgtctttgcgagccttgacgacttggtaccattaacggtgagcgtgcagcacgccgcattacgacctacctcttatctgcgcagcgacatggacggcgacgtgcgtaccgcggcagacatcagcagcacgttgcggtccgtgcccgcgccacgaccctcacccatcagcaccgcttccacttccagcaccccacgcagtcgaccccgcatctagagagagacttctttgtttttcccccgcgtgtttttcccattccctgtatttatttctaaataataaaaacacagagacgttgataataaccgcggtgtgctttattagggtatcacggtgtagaaaaaaaaaagagagggaagccctaaatatagcgtctctcttactcgagcttattgagcgcagccacaaaaatccgccgattcagatctaccatgtctttgggcgggctctgggaagctgcggcggcttgggcagcagcggcggctaacacgacactagccgggcaggaagaagaaccttccgtcgagggcccggccgttgccgtctcagaacccgacgtggtagcgaggcggcaactggcgttcaccacgccagcctgagcgcgctcagctaccttggcacctccggatagaagtgccgtgggtgtttctcctccgccactcgtcagctcgccggtgggagtacacacggtagtagtagttggggaggaagaggccgcagcggggagagccgccgaaagtaacgtagaactctgccgcgcggcaaacagatcgcgtttcagctcgtgaatggcatcccgcagttcatcgtaacgttgttgctgctgctgattggaacccgcgtgcccgccacttccaccgtcgctattgacgtgactttttagacgctttcgcgcccggccgtgctcggcctcgccggggaaactcaagtcttcgtccgaggacgacgacgacgccgccgcagcttccttacggcgtttgttgtgtccaccgctgcccccgtgacggtgctgcttctgcgactgaccacggtgaccaccgtcgtaacgctcccatccggacggtggttcatccataccgcccggagaatcgcgccgacggtaataggctggtgatggtggcggcggcacgggacaagccgaatgcaaaggcggcgcgggctcgtaacgccgaccccacccgggataatggggatccacgtattccgcaaagtgacgtgccgccaactggtcgtaacccacgacgggggcgccgtagggcgcgggataagacggcaaaggcaacggtgctggcgaagcagaaggaggagccgctacggcaccgggatacatgacgggcgctgccgagcgactggccccaagtagcgagaaaaaagcgtctttgggtaaataaactccgtcgtgaggccacgctagagacggcacagccggcgacgcacctgccacggtagcacctggaggagccgtagcggcgggaaccgcagcactcagagggtgcgacatggacgccgcctctgccggctccgagggagaaagcgacggcggtgattccgcgggaagaacggacggcgacgctggaagcgcaggcggctggacaggagatggcggttcgactggaggcgacggggacgaagagggaacccgcgccccagccgccggcgtggcggcctgactgcggctgtcgcccgaacgctcggcggacgccgctttaatatcgcacgccgcctcaggcgaaacgctcgccttgacgtacgactcgcgctccgtcacgccgactagttgcttgtcgtagcgcagcttgggcagtcgctcacggatgtagagcgcgtccacgctgttgcccaacaggccgtagctgtctgagcgaaagggatcgcccgacgcgtcgacagcagtgctgccgcagcgctgccactgtgcacgtagcccgtcacggtcggccgccgtgaggtctggaaaccgctgcgtgacccactcgggatcgcgcccgtacacggccaacgtaccgcgacgccgacccacgctgcacaaagccacgtgtttgaacggcgtggtttccgagcccgaaagcgacgtcgcggcctccacgtcgtcgcagcgccggctggagagcgagaggccggcgtagctgccgctgagaaactccaccaccttgtctggctgcagcggactgacgggcccgcgcgaaaccagctcggacttttccgaagcgcggcgtacaatctccagaaacctgggcgaagtgacgcagcccaggcaaaaaagaccgtcgcggacgctctgcatcgccgcaacgtgtcctacaacggccgtgtcgtcgtggttgatgttgagcgggagcgcgaccgacaacgaaggctgtctctggccctgcgcgtgcaaccagtgctccactacgtcccgcggcaacagcaattcggcctcgtccggagactggtcatagcgggcgagaaagccgcccacgtagaccggcgctacagcctgcggctgctgctcgtccatcgtcattgtcctcaccgtcgctacccgctcaccgagcgaacgatgatggcccgcgacgaagagaaccccgccgtcccgcgggtccgcacgggcaaattctcctttacttgcgccaatcatctaatattacagattagcgagaagatgtcgcgcggacagccgctgagctcgctgcgtttggaagaactcaaaatcgtacgcctcatctgcgtcctcctctttcaccgcggtctcgaaacgctgctactgcgcgaaaccatgaacaacctgggtgtctcggaccacgccgtgcttagtcgcaagacgccgcaaccctactggcctcatctgtaccgcgaactgcgccaggccttcccggggctggactttgaagcggccgtgttcgatgaaacgcgcgccgcccgtctcagccagcgcctgtgtcacccgcgcttgagcggcggactgctgacgcgctttgtgcagcgccacaccggcctgccggtcgttttccccgaagacctggcgcgcaacggcaacatcctcttctccctaggcacgctctacggacaccgcttgtttcgtctggcggccttcttcacgcgccactggggtgccgaagcgtacgaacccttgattcgcataatctgtcaaaaaatgtggtacttttatctcatcggcaccggcaagatgcgcattacccccgacgccttcgagatccagcggagtcgacacgagacgggcatttttacttttattatggaagattacagaacgttcgccggcacgctgtcccggcacccgcaccgtccgcacccacaacagcagcagcaccaccaccccggtcccccccatcctcctctttctcaccctgcctcgtcctgtctcagcccagaggccgtactggccgcccgcgcccttcatatgccgacgctggctaacgacgtgtgaacctaacgtgatttatctgccacttttctccccgctgccgtacagcgccgccgctcataatgccgtcaccgtcgcgtcggacgcgacggtgttttcgccgtcgatgcagaggacggaggaactttcggccgaaacatcgatcgtagtcccaggacacatttcggaagccatgccttccgcgtgcttcaccaacgtggctttctccgacgtggttgtcgttaccacaacggccgccgacgtcgcgtcggcgtaacaacggctggaggactttttcaccgcctcggcgacgtctcgaacggacgtagaaaagtaacacacggccagctccacgctatacatagcccgtttcaacgcctgcaccaaccgacgtacgaaatgaccgtggcagctttgctgacatctctcgaccagataatcaaaggagtcatccagatccttggtgggctcgcgggagaagaacgcaatgataaagagcggcagaatgccaagacgcatggtgagaagggtacgcgtagccaattccacgtaatccataatgccgaaaccggtgccggccgcgctagcgggctgcagtacaccgcgtaggactctgaagcagtagtagggcacaaacagcatgagacacgtcacgtagaaggtgcagacacgacccacgtaggaccagacgtggtcgcgccgatcgctgtaggccaactctaccacgttagccagtacggcgatcatgggcgcccccagcaaaaaccacatcttgatggtgaggtccaccgcggcatactgtatagggatctgacagcctagccaacggtagtccagtgaacccgtagcggcggtgggcacagcggctacgatggaaagaacccaggcaaaggcgaccgcgtagagcgccacgccggcgttttcgcgcgtttcatgatgccagagatcacggccgtaagatatggccgacagacgatccagtatcagaaagaggaaaaacaacgccgtcgaatataggcccacgtcgtcgacaaagagcactaagcgacagaggctgagatttagagcgccacgcagcatgatacccttggacaacatggtggccacgatagaaaaaaactgactaagtaccagattccaagtaaaaatcatcacggacacgggcggccgcgtaacacgcaacacccagaggcaaccgatgatagtcagcaggttgaccaggctaacggagccgaacatgccgatgagtagatccgaggcggcgcgatcggccgacatagagtagccttcgaacgggcccatgtgtttgaaactcacgatagcgaacatgatggactcggtgactgaagtagtctcctccacagaaggggacatacccaccaccgccgcccgctctcgccgaacgaatataccctctccggggacgttcgccctttatgcagcgagcgacacgtggtggaaattacaacaccgccacgctcggaagaaaccccaacactaaaaagtacaacagttcgtaaatatcgttgacgttaaagagggacgagcccagagtggacacacggtgacgcggcagggtcactgacaacagccgccctagcccgtgttcgtagtgaaagagcagggtatcgtgtacctctaagcgacgtaaatcgccgtactgtttggagctctgcgcgaacatgtagtcggccacggggttgctcttgctgagctgcatgagcacggcgccgccgccgtcgccacctccggcgctgtcctcgcgacgtgagggatcccagccgctgcgcacgctctcggtcacggccaacagagccaggccgggaaagagctgcgacagcgtgaccgcggggtcgcgcgcgtaccacggcccgatgtagtactgcaccagaaactcaaagttacgtacccgcccgtgtcgccccccgtagccctcctcttcgccgcccgcgcgccccccgggcaacccgccgccggctacggcatccgaacccagcaggtcggccaacgtaaatttgcccgtgcgcggagcgaagacgctatccgcgttggtcaccttccacaacagcagcaggccagccaggcaggtcaggcccgaacgcagatattgctgttcgtgcacaaagacggggacgtcgcgacccagcttgccgactagcagacgtcggctccagagagaaagcacgtcgtcgcgcacctggcccgacagacgctcttgcaccagctcctccgttatcgtcccgtagcccggcaaatgctgaagaacgccgcgtttgtggaaaagccgcaccagcacgtgacgatcaaaagtgcccgggtgatagtggcgaccaccgcttaggggcatgtagtagcgtagatcgggcgagtcgcgatacgcgtaatagttgttacccgcggcgacggggccttcccaagcggcaatctcacgactcacgtcgtcggccagacgcggtaacagctgaggcagctcactcaacaccgccgtcacggagtccggcggatcgcggccctcccaaagcgcgtgtccgtaggcgactagcagacaggcggcggcttccaaatcggagagtacacagtcgtacgtcggatacaccgtcacgttttccaaagcgttgaccacgccgagcagcagctcctgcgaaatggaaaagttgtccatctgcgccagatggtacactcgtttccaccgtggttgcgtgtacaacccccgcttgagccgatagtaccagataccaaaggagaaagtccaagtggaggcgttctcgaacatggtgttgaccacctcgccgcgaaaatcggtgtgaaagcggataaagggatcgttctgcgtgattccaaagtagttaggtacgttcccgggcaacggctgctcggcgcactgcgccagccaggtagaagaagcaccggcggccgctgacgcggcgaccgcgtcagacggggcggcggcgggtcccgtgatggcatcgtgccgactataaagaccgtgtgggacggcggaagctcctgccacgccggtccctggggacgacgaacgcggacgacacggtggttgtagcagcgtccgcggcgacggtccttcgtcgagctcgcactgctggttcaacagcgcctccgcctcggacacgcgcccttcgagatcctcgcagtaagtctgcaccctgtgacccagatccctcagctcctgacgcagataccgtttgcgcacccggtccatgagcacgtcctcgcgccagcccccgccgcgcattgccaccgccgcgtcctccagcaaccgccgaagcacgcgctcggggcagcgcagcacgttttcctcgtgcggctcgaagaagacggcgacgggtagccgccaaaaggtgtgcaacagactcatcctgacgcctccctagatagtccaggacagaatcggtacacaggttaaaacggcctgagcggaaagcccgataaaaggatgggcgatcggccttttgctgaaaaaaaaccagactgggcaccacgctccaaacttgaccgccaccgcgtggcagacgcagaaaatcaaagtccaccagtgcgcccttgagctggcgcaggccctcggcgtactgcagactgtgggtggcgtgccaccgcacggactgatcgtcggcgtctgagtacgtggttttgaactcaatcacgtagcaatacacgatgccgcgcgacccagagtccggcggtaaaaacaccaacacgcagtcgggaatccgccgacttaatcgtacttcgataaaaagacggcgacggtacttttgcaactcgggtgggaaaagacctcccaacaggcggttaagcgccacaaacgagggaaagacccgcagcaggcgacggtagatatccaggtgcttgcgcttaccgatccgcttacgcacgtgaggcaatctccgcagagcgttccccgtcaaatcagcgtcgtccccacgcccggacggcatggcttattcgcgtgtcccctcttctcccttcgcagcggccaatgacatcgtattaaatagacgaagacgcgacttttgtaacccgtagcgccgcacccgggtgctccttcctgggatcctttttctccttctctcgggtgtaacgccaaccaccacctggatcacgccgctgaacccagcggcgcggccgcgctatgcggcccggcctccccttctacctcaccgtcttcgccgtctacctccttagtcacctaccttcgcaacgatatggcgcagacgccgcatccgaagcgctggaccctcacgcgtttcacctactactcaacacctatgggagacccatccgtttcctgcgtgaaaacaccacccagtgcacctacaacagcagcctccgtaacagcacggtcgtcagggaaaacgccatcagtttcaactttttccaaagctataatcaatactatgtattccatatgcctcgatgtctttttgcgggtcctctggcggagcagtttctgaaccaggtagatctgaccgaaaccctagaaagataccaacagagacttaacacctacgcattggtatccaaagacctggctagctaccgatcttttccgcagcagctgaaggcacaagacagcctgggtcagcagcccaccaccgtgccaccgcccattgatctgtcaatacctcacgtctggatgccaccccaaaccactccacacgactggaagggatcgcacaccacctcgggactacatcggccacactttaaccagacctgtatcctctttgatggacacgatctgcttttcagcaccgttacgccctgtctgcaccagggcttttacctcatggacgaactacgttacgttaaaatcacactgaccgaggacttcttcgtagttacggtatccatagacgacgacacacccatgctgcttatcttcggtcatcttccacgcgtactcttcaaagcgccctatcaacgcgacaactttatactacgacaaactgaaaaacacgagctcctggtactagttaagaaaactcaactgaaccgtcactcctatctcaaagactcggactttctcgacgccgcactcgacttcaactacctggacctcagcgcactgctacgtaacagctttcaccgttacgctgtagacgtactcaaaagcggtcgatgtcaaatgctggaccgccgcacggtagaaatggcctttgcctacgcattagcactgttcgcggcagcccgacaagaagaggccggcaccgaaatctccatcccacgggccctagaccgccaggccgcactcttacaaatacaagaatttatgatcacctgcctctcacaaacaccaccacgcaccacattgctgctatatcccacggccgtggacctggccaaacgagccctctggacgccggaccagatcaccgacatcaccagcctcgtacgcctggtctacatactttctaaacagaatcagcaacatctcattccccagtgggcactacgacagatcgccgactttgccctacaattacacaaaacgcacctggcctcttttctttcagccttcgcgcgccaagaactctacctcatgggcagcctcgtccactccatgctggtacatacgacggagagacgcgaaatcttcatcgtagaaacgggcctctgttcattggccgagctatcacactttacgcagttgctagctcatccgcaccacgaatacctcagcgacctgtacacaccctgttccagtagcgggcgacgcgatcactcgctcgaacgccttacgcgtctcttccccgatgccaccgtccccgctaccgttcccgccgccctctccatcctatctaccatgcaaccaagcacgctggaaaccttccccgacctgttttgtctgccactaggcgaatccttctccgcgctcaccgtctccgaacacgtcagctacgtcgtaacaaaccaatacctgatcaaaggtatctcctaccctgtctccaccaccgtcgtaggccagagcctcatcatcacccagacggacagtcaaagtaaatgcgaactgacgcgcaacatgcacaccacacacagcatcacagcggcgctcaacatttcgctagaaaactgcgccttctgccaaagcgccttactagaatacgacgacacgcaaggcgtcattaatatcatgtacatgcacgactcggacgacgtcctttttgccctggatccctacaacgaagtggtggtctcatctccacgaactcactacctcatgctgttgaaaaacggtacggtcctggaagtaactgacgtcgtcgtggacgccaccgacagccgtctcctcatgatgtccgtctacgcgttgtcggccatcatcggcatctatctgctctaccgcatgctcaagacatgctgactctaggacctgacagtttacgagaaaaaggacagagaagttaaagacattcacacaaaaccttctaaaacggtacgggccccaacacttaggggcactcttgctcgttgtaataaagtacacgccacacggtgtgatggtactatgtgcgtgaggtctgtgcgtctttatttacgaggtactgttgtgggtctggttacatatcgggccctggatacaagctcggtacacagccaaggtgcgggagactaggtcgtcttggaagccgatgcaacaacggtagatgagcagcaaaacgaccagaatcagcagtgagtacacgcaggcaagccaaaccacaaggcagacggacggtgcggggtctcctcctctgtcatggggagaaaagaagacatgagaagcatttctaaattattctttattatatcactgactgtcctgttattttctataataaactgtaaggtcgttagaccaccgggacgttactggttaggtacagtactttctacgataggcaagcaaaaactagataaattcaagttagagattttaaaacaattagaaagggaaccttatacaaaatacttcaatatgactaggcaacacgttaaaaatcttactatgaatatgacccagtttccacaatactacattctagcgggtcccattcgaaacgatagtataacctatctgtggttcgatttttatagtacccagcttagaaaacccgccaaatacgtctactcacagtacaatcatacggctaaaacgataacattcagacccccatcttgtggtacagtgccttcaatgacttgtctttccgaaatgttaaacgtttccaaacgtaatgatactggcgaacaaggctgcggtaattttaccacgttcaaccccatgtttttcaatgtaccacgttggaataccaaattgtacgtgggtccgactaaagttaacgtagatagtcaaacgatttattttttgggtttaaccgccctacttctacgttacgcacaacgcaactgcacacacagtttctacctggttaacgccatgagccggaatctattccgcgtccccaagtatattaacggcaccaagttgaaaaacactatgcgaaaactaaaacgtaaacaagcgccagtcaaagaacaattagaaaaaaagactaaaaaatctcagagtactactacgccatatttttcctatacaacgtctaccgctctcaacgtcactactaacgcgacttatagggttaccaccagcgcaaagcggattcccacatctacgattgcttatcgtcctgatagcagctttatgaagtccattatggccacgcagttaagggatctagcgacatgggtgtatactactctgcggtatcggaatgaacccttttgtaaaccagaccgtaaccgtaccgccgtgtcagaatttatgaaaaacacgcacgtactgattcgtaacgaaacaccgtacactatttacggcactcttgacatgagctccttatattacaacgaaaccatgtccgtggaaaacgaaacggcttccgataataacgaaactacacctacgtcaccatcgacgaggtttcagaaaacgtttatagatcccctatgggactatctagactcgctgctgtttctagataaaatccgtaactttagcctccaattacccgcgtatggaaatcttaccccgccggaacaccgccgggctgtaaatctatccaccctcaatagcctttggtggtggttgcagtaaagttctgaaagcagcaatgtcgtagtacgatacaaaaggctcccatcagaatgagagcgttaagcatagtccaccaggctgcaaagctggacagtgaaagctcatacatatgcgatgtacaatgcgcattgtaaaaatcattgtgagcatgtggtctcatcacgttggggtcgtgagtggtggaaccgggtttggtactagtcgtcgatgaagtacttgtcgccgtagttgtactagttgtcgcaacagccgttgacttcacggttgttgaggtgcgagtagagctagaaggactcggtgtgctagcagtcgacgtattgttggaacttgccgctaccgataaaaccaaaagacctagtactagtgtgttccactccatcgcaccaccgccacgatgcttacgatgttgaccgaccgaatcgactctcaactggtactgtcgcggctgccgcgctcccgttttcagcgattctgggagacccctacgttaataatgaaggaagagtccgcaccgtcatcaggctccatcatcctagccgagaaatccgtcaacatgcgttactgcgtgcgtttcgctagcgatagcgattttcaaaccacatttacgctgccccaatcgatcgaggagaaatacgacaaagagcagcatccgggagaagatgaagcgtcgtcgccattaccgtcgccgctcaaagttccctacaagtggatgccttccagttttatcgtcaaacaatgccacacgcagctggccttttacaataaacacatcatttggctatcacgcgagcgcaaagtgcccacctcgctgggcgtcagcctctatatccccgaaggttttttcggcattaccttttacaaatgcctggacgcgcaattcgtttgcatgcccgagctgctggaatccgggctgcaagtcccgcagttggatgtcgtcaacctcaacgacacttttcagtccatctttccgggcaccatcgaaggcgatatcggcgttttcccctgttttgtgccagaaccctggcagctcatgaacttgccgccgcccaacgaacaccgtttcttttcattacgtacccgtcagacgctggtgatcggtccgggtcacacgcaaaccgtctattttgacgcggcctacgtgcacgcgcccggtatctgcgccctcatagtgggcgtgcgccagtttagtcagtcggatctcatcatccgacccactatctggctcccgggtaccgcggccggcgtgacggtggtcaacacttcgcacaccaccgtctgcatctccccacacaccaccgtagccaaagcggtttttaccacccaccgctttacctatctgccggtgggcagtcaccccctaggacagatgatcgtgccgcccacccccgacatcggtttcacccacacgcccgagcacgcgttgctgcaacggacaccctcgccggtagacgatgacgtcgacgagacagaagaagatgaaaagagctccgacgcagaaagccctgtcaacacgagtgacgttatttttgacgtaggtccgaaacctccccgtaatccctgacctaataaagtacgtctatgagaaaccccgtactcgtcgtgtccgtgatcacgtacgttttccaaaacgtgccaggctgttcacgcggaggacagcaaggccgccgccgtgggtttctttttcttcacgcccctgagttcacgcgcggaacccacaaagggtatctggggaggaggtatggtgaccatgttcggtgacatcaccgcctcccgaggcacgtcggggctgtgtcgcatgagatccaaaatctcgcgttcgtgattcgtaggcagcgtctcctgcggcgccgactccttgtagcgccgacggtgagacccgcgtccctggggctgctgctgcacgggctcgaccggcggctgctgttgcacgggctcgggtgacggcgacatcacggtcacttcatcctcctcgtcgccctcttccagcagccgctggtcgaacctcataacggtgggacaggagacggtgttaatgtgagccaaactcatcataggacgcgtgacccccgtttcctcggggatcagcgagtccgaaaccgagggacaggcaaaggccgacacggcggcgaccgtttccccgtcctcgcggacgccgctttccccctgaacgaccgccggtggcgtcggtggtgcaaccgtcgcagccacgccggcctcgagcatgtacgcgcttttctcgcagtccatgtccaccaggcccataacgcgctgcacctccaccagcgaggcctgatccgtggagaacttgtccagcaacatctccaggctgtcggcctcggacatggcaaactcgcccaccaccagtttgaggatgagaatgtccagggcctccaggatacgctgcgatttcttgcactccacctcggccgccggccgcgtgtgaggcaaacagccctccgagagatagcccttgagaaacgcgcacttgctctggcattgcctatagagcggcagcagcttcagcaggtggttcaccacgtccgtgtcgcgagaaaaggttcgcaggtcggccggggtgatctccagctgcttaaagttctcgtccagaaacgcctgcagctcgcgcagctccacgtcctcgctaggctgcagcagcacgtaatcggccacaggcgcggctttgcgacggcacatcagcagctcgcacaggcgctgggccagctgcatcgtgccggcgcgacgatgacgctcgttctgttcgcaacagagtatgattctgctcatatagtcgccaacgtactctcgcagacaccgacggaccactgcgtcttccccctgctggtcaaacaccaggtctcgcgacgtgtttatttctgcctacagacgcaaaagtgctcggactcgcggcgggtggcgcccgtcttcgccgtgaacaacgaaacgctgcagctctcgcgctacctggccgcgcgccagcccatccccctctcggcgctcatcgccagtctggacgaggccgagacgcaaccgctctaccggcatctcttccgcacgcccgtgctctcgcccgaacacggcggcgaggtgcgcgaattcaagcacctggtgtactttcaccacgcggccgtgctacgtcatctcaaccaggtcttcctctgccccacctcgccctcgtggttcatcagcgtcttcggacacaccgagggccaggtgctactgaccatggcctactacctattcgagggccagtacagcaccatctccaccgtggaggagtacgtgcgcagcttctgcacgcgcgacctgggcaccatcatccccacgcacgcctccatgggcgagttcgcgcgtctgctactgggctcgcccttccgtcagcgcgtgtccgctttcgtggcgtacgccgtggcgcgcaaccgccgcgactacaccgagctagagcaggtggacacgcagatcaacgcgttccgcgaacgtgcgcgtctgcccgacacggtctgcgtgcactacgtctacctggcctaccgcacggcgctggcacgcgcgcggttgctcgagtaccggcgcgtggtggcttacgacgctgacgcggcgcccgaagcgcagtgcacgcgcgaaccgggttttctgggccgccggctttccaccgagctgctggacgtcatgcaaaaatacttctcgctcgacaactttctacacgactacgtggagacgcacctactgcgtctcgacgaatccccccactcggcgaccagcccgcacggcctggggctggccggctacggcggccgcatcgacggcacgcacctggcgggcttcttcggcacctccacgcagctggcgcgccagctcgaacgcatcaacacgctttccgagtctgtcttctcgccgctggaacgctccctgtccggcttgttacgtctatgcgcttcgctgcgcacagctcagacctacaccaccggcacgctaacgcgttactcgcaacgtcgctacctgctacccgagcccgcgctggcaccgctgctggagcgaccgctgcccgtctaccgcgtacacctgcccaatgaccagcacgtcttctgcgccgtggcctccgaaacctggcatcgcagcctctttccgcgcgacctgctccgtcacgtacccgacagccgtttctcggacgaggccctgaccgagaccgtgtggctacacgacgacgacgtggccagcaccagccccgagacacagttctactacacgcgacacgaagtcttcaacgaacgtctgcccgtcttcaattttgtggccgactttgatttacggctgcgcgacggcgtctccggtctggcgcgacacaccgtctttgagttatgtcgcggactacgacgcgtctggatgaccgtatgggcgagcctctttggctacacgcaccccgaccggcacccggtctatttcttcaaaagcgcgtgcccacccaacagcgtgcccgtggacgcggccggcgcgcctttcgatgacgacgactatctcgattaccgggacgagcgcgacacagaggaagacgaagacgggaaagaggataaaaataacgtcccggataacggcgtttttcaaaaaacaacgtcctccgttgacacgtcacccccttactgccgctgcaagggcaaactggggctgcgcatcatcacgccgttccccgcctgcaccgtcgccgtacaccccagcgttttacgcgccgtggcgcaggtgctcaatcacgccgtctgtctcgacgccgaactgcacacgctgctggaccccatctcgcatcccgagagcagcctagacacaggcatctaccaccatggacgctctgtacgtctgccctacatgtataaaatggaccaagacgacggctatttcatgcatcgccgtctgttgccgctgttcatcgtgcccgacgcctaccgcgaacacccgctaggctttgtgcgcgcccaactggatctgcgtaacctgcttcaccaccacccgccgcacgacctgcccgcgttgcccctgtcaccgccgccacgcgtcattctcagcgtacgcgacaaaatctgcccctcgaccgaggccaactttatcgagacgcgctcgcttaacgtgacgcgttatcgacgccgcggtctcaccgaggtgctcgcctatcacctgtacggtggcgacggcgccactgccgctgcgatttccgacacggacttgcagcggctcgtcgtcacccgcgtgtggccgccgctgctcgagcacctcacgcaacactacgaaccgcacgtcagcgagcagtttaccgcgccccacgtcctcctctttcagccccacggcgcctgctgcgtggccgttaagcggcgcgacggcgcgcgcacgcgggattttcgctgtctcaactacacgcaccgcaacccgcaagagaccgtgcaggtgttcatcgacctgcgcaccgagcacagctacgcgctctgggccagcctctggagccgctgtttcaccaaaaagtgtcactccaacgccaaaaacgtccacatttccatcaaaatcagaccgcccgacgcgcccgtgccgccggcgaccgccgtctgagcctcactttccacggcgccggtgacccgccccccggcagcggtctcatctatatatacatcagcgtgcccgaacgtgaccttcctagcgacggcggccatggagctgcactcacgcggccgtcacgacgctccgtcgttatcttccctgagcgagcgcgaacgccgcgcccgtcgcgcacggcgcttctgtctggattacgaacccgtgccacggaagttccgacgcgagcgaagtccaacctcgccgtcgacacggaacggagcagccgccagcgaataccatctcgcggaagataccgtcggcgccgcctcgcatcatcaccgaccctgcgtccccgcacgacgaccccgctacagcaaagacgatgataccgaaggcgatccagaccactatcctcctccccttccaccctcctcccgccacgcactcgggggcaccggcggacacatcatcatgggcaccgcgggcttccgtggcggacatagagcgtcctcctctttcaagcgacgcgtggccgcgtccgcctcggtgccccttaacccccactacggtaagtctcacgacaacgatgacggcgaaccgcaccatcatggcggcgattcgacgcatcttcgtcgccgagttcccagttgtcctacgactttcggttcttctcacccctcttcagccaataatcatcacggatcgtccgccggaccgcaacaacaacagatgctggcgcttattgacgacgaactggacgccatggacgaggacgaactacagcaactcagccgtttgatcgaaaagaaaaaaagagcgcgtctgcagcgcggcgccgcctcgtcgggtacctcaccgagttctacctcgcccgtctacgaccttcagcgctacacggccgagagtctacgtctggcaccctaccccgccgatctcaaggtccccaccgccttcccgcaagatcatcagccgcgcggtcgcatcctgctgtcacacgacgagctcatgcacaccgactacctgttgcacatccgtcaacagttcgattggctggaggaaccgttgctgcgcaagctggtggtggaaaagatcttcgccgtgtacaacgctcccaacttgcacacgttgctagccatcatcgacgaaacgctcagctacatgaagtaccaccacctgcacgggctacccgtcaacccgcacgatccctatctggagacggtgggcggcatgcgtcagctgctcttcaacaaactcaacaacctggacctgggctgcatcctggaccaccaggacggctggggcgaccattgcagcacgctcaaacggttagtcaagaagcccggtcaaatgagcgcctggctacgcgacgacgtctgcgatctgcagaagcgtccgcccgagaccttctcgcaacccatgcaccgcgccatggcctacgtgtgctctttctcgcgcgtggccgtctcgctacgccgtcgcgcgttgcaagtcaccggtacgccccaattttttgaccagttcgatactaacaacgccatgggtacctaccgctgcggcgctgtctcggacctgatcctaggcgccctgcagtgccacgagtgtcagaacgagatgtgcgaactgcgcatccaacgcgcgttggcaccctatcgtttcatgatagcgtactgtcccttcgacgagcagtcgctattggatctcaccgtctttgccggtacgacaacgacaaccgccagcaaccatgccactgccggcggacaacagcggggaggagaccaaattcatcccaccgatgagcaatgcgcaaatatggaaagcaggacggacccagcaacgctgacagcctacgataaaaagaacagagaagggagtcatcgacatccctctccaatgatcgccgccgctccttccacccagccaccgtcgcaaccacagcagcactactctgagggcgagctggaagaggacgaagacagtgacgacgctagcagtcaagatctggtacgagccacggatcgacacggggacaccgtcgtctacaagacgaccgcggtccctcccagtcccccggcgcccctcgccggtgtccggagtcaccgtggtgagcttaacttgatgacgccgtcgccttctcacggcggcagtccaccccaggttccccacaagcagcccatcatcccggtgcagtccgccaacggtaatcacagtacgacggcaatccagcagcagcagccgccgccgccgccaccaccggtaccgcaagaagacgactcggtggtaatgcgctgccagacgcccgattacgaggacatgctgtgttacagcgatgatatggatgactaaaaagagagtgaggggtgttgtgcgtgattgctgtcccttatcccgttacaaagaaaaaagaaaaaatggtgttacacactccttggtactactatgactcgtggtgagatatccgatgatgataatgatgtacgcgtgcctgagcttggtgtttttttttctctctgtgagcttttttccccataagctgtgtactgttcgtgtccggaccccatacacggtttccgttaatgacggccccctccttttcccccaccgtaaaaaaaaaaaacaaagcacaatacacatgtggttttttggttcgaatcgagcttggcgtttatttcttctcgagccccacgtcctctccctcccattctttttatatatacacatgcccaagattggggggggggggaacgtgtgtcgtttccaggtcgtggtgacgatgatgatgtggtttttatcggggtggtagtacaagggtttgctactgtagtcgaaaaggtgggccgagaacatagaggaactaactcctaagcgatggctcaaaggcggatgagcaaatcattaaaatccttgactgtctatggttatgcaaaaggatatataaggtataaatagcgtatataaaaacatatatctatgtacaagacgcatgggataaataacacgtatttacacatttttctgcacatgtacaacatttgaggacgaggagacgacgaccggccggtcgccgccgccgcggttgctactactttcttaagtgatgcgaattggtggctatggtgaggagtttggaggaaataatatacatcatatattctgatgacagtgtagtaaacatttcactggcttcggcccggtgcgacggagggccccgacgtcccctctcccggaggggggaagaggcacgacgagcgagggccccgtcgtacgaggaacaagaatcttcttcattctttcacagtaaagcacatttctttatgtggggacgggaatcgatgtcatttgtgtatttgcattcggtagagagctacagtctccagtttcacgatcgttgtgcatcatacaacgacactttttatcctacaaatttcacacctatctatatacacacaatataaggttatagcatcatctagtttgttcatttcatacctgttgagaacgtttatgttctagcaattgatttcgcgtcatagggctgtgacggtgattcttcagagaatcagaaaaaaaaaagaggctcaacgagcaccagagactaagtcggaaaactcgcgcccgcttccccggacggtttcagcttagcctctggcctgcgatggtttttttattccaagttcgttccatgaatagagcgttatacgattgtgttttcgtgtcattcagacgtggttgatcatgttactacgtgtgtgttttttgctttggtcggtacacggtccctttcagcggacccagtgttccttggagagacgaaaagcgagcgtgtttcacgagatggctgatgccgagtgtcgtcgacataagtcattttctaaagaagcaacataaaaaaaagatgatgtggttcgtcgtactcacagtctcgtttagctactatagatattatagatccagagagcgtaccgcccgagagaacaccgtcttctccgggacgtcttgccgtcgtccgtcacccgggcgtcgagatgttcgtagagaacgatggaggacgaccaacaccgacaggtggtgctcatgagggtgtggtgtcgatggtgcgttttttttttttgcctcggcacgaccgtatttgcccgtcttaccgcacctccggaaagatggtgtttttacgcaggtgggtgaggcagttttttcagatgacaacgatggtaccgatagagcctgagatgatgatgatgatggctacgaaggacgggcggacgggcaaacgatggtaagaggtcgctaccgaggggtgccttttttttttctggtcagatggaacgtcgtcggtctcgagcgccccccgatgtagggccgctctcttacgtatcccgggtcgattcagaccgacaaaaagagcgtccagagacgcggtctctttcttctcgaacggaaagtccgaatcctacacatttctagtcgtgacggctagctttttggtggtcatggcggtggtggtcaacatatatctccagatataggagatgaggaaaaaaaaggaggacaagtctaacggaataatatccgatcatatatatggagggatatcaggtcatcattgtgtatcaaaagatgatttgtacaacagggaaggatacggttttaaaggttagtgcagagaaactatataaagagcgtataacatggagttcattctgtcattaaaaaggttctaagtagagcatattaaaaatagacgagagctagagttttattcttggttcatcatatattttgtaaaaaaaaatagaaaaatataggtgccggacgccggctacgtcccagtccggggcttagcgcacccaaacgcaggtttcccccgttttcaaacacctcaagatcttttgagaaacacatatttttgttatacacagtgaaaacgtggggggacagagttccaaacacgtgtctatcaagcaaaaattcagacgatataaatatggagagttttttcttcttatacaacagcgacagttcggtgtacatagcgtataatatatataggtcacatacagacttatgagctttttaccaaacagatgcaaatcgcctaccggaggcgggatcgggcgtgaggttctggctgcacccgcccgatccctcgtcggcttctccggcggctgtcctaaaatgactaggttcgtatatagagctataggtctttcatgatactgatgagaaatctatggtttgcgcgtcttatctgaatatatctagcacgatatagacgatacacgtcaagatcattgtatcacttcttttcgtctacgtggtaagagtcttggatactaaatatgtatataggcagcatttatagtttcaaaggatagaagatagtttttggacactgatagatatggcgttgttgagcggttgtgttggatgaacttgtcatcattctgtattttttcacataaggtgttcttttcttcgagcagtttataaaaggggtcaggcgcgatgactagagggcgcactttgggtgcggtcctccatcgcttgtcaacaaccggatgtgactcagcgagcacgagatggtttgacgtcagcgaccgttagccctcagggcgaaaacaggaagagtcgcctcgacagcgccctctaggtagcatcacggaacaggcggcgaccgcggactcgcctcagccagggggtaccgaggcggtgcccgcgactcgcccctcctccaagatggcgccgctcggccagactcgtcgagattttcagggctatcattttttcgctctgagcagaaaaaagctcttctaaaacgtctcaaaaaaagcacagaaaagttatcgtgctatttttttacccgcctggagcgaaaacgctcctaggctctcgacgccattttctctcgtccgccatgtcggagctcagaacggcatgacgagcgagagaaccgtcgaggtcaccaagatggcgccggttggggtgcggtcaaacggtgttttacagtttcggggccatttgaacagagaaaggtggggaattttaagggacacggttttgtcggatgggggagaaaatcacgccctgccgtcgtattgtctcgaatttttttcggccgtctgtacccgtatcggttcacgggttttccacggcaaatcggggaagggaaaaaaaaatggtggggcctgttcccttcccgggtctcggacgggtcgacacgccgggtgggacggtcgtggtctcctcggcccgtgccgggaccctccccgtggattcacggtgttccggacccctccaggaaagggtggaaaacgcgtggagcccacggggacgtgcgttcgtgccggggaaaaacccgactgggcctgaaccaacgttgggtgacctgccgggcccatcgtgtggggacggtgattgtggaggggcgtactgacgacaattgaagtgtcatggcggcccaccgtcgaccccgagcgcttccggccacacccaacctcgccgccgcatcggccagcacacacgccacagcctggtggggtccgaggcgccgaccccggctgggcggccgatggggggaggggagtggggaccacgcccagggccagcaagccgcgacggttcgggcggacttttttggggagcagcgggggaggggagcgtcacgggaccggccaacgcccaggataaggcggcccgagagccggcggctaggccgagggacccccggtcacgactggcggccggaccctcgagaggggggaggggagcccaaccggagccgccgagagggagccgccgcgagacccggaagccgtcgcggtcgaccccgctcccggagctcctgaccgggcccccagcccccaaccttccgggaccgactgccgttgagccggggcgtcgcccgtccccaccaccgtccacccggcccacctaccgtcgtcgtcggccgaccgccgcgacccccagccggaaaaaagcccggaggggcccaaaagccagcggggcgggccgggaaggggagctgggtggggaatccccggtcgcccaccgcggaacgagcctaggaaccggggtccgcgacccagccccccgtggggggaggggaagggcgcggaccccgggtcccgtccgttccgcggcgggtggaccgggaagccggcggaggtcgccgggagcagcgagggatcccgggccggagcccggggaggagcggggtgggggtgggaagcccccgctcgggtccccccgggctgcggacgggaaccggaaccccggtgcgggggtcccagcccggccgggccgtcggatggggggtcgagcggggggaggggagggacccccggccgaggtccggagcgggccgcgcccggtgcccggcccacggccccggatggtgctccagggcggtgggacgggcccgcggacggaccggcgccgggcctcggccggggagggtggggggtagggcgggaagcaggcgggagcgggcgcagcgtgcggaccgcagcacggccggaaccctgccgcggactgcgccggggggcggcgggcacgccgggttttataggttttcagatgccccgcctaggtgggcggagcggtaattttccaccgccgcggcccatgcccggcacggggctcgcgctccctaggtgcggccgcccagtggaaaaacaccggcgcatgcgcacggcgcacatccagtggaattttaccgacgcatgcgcactgaccgcctccagtggaaaaatactggcgcatgcgcacgacacacacccggtggaattttaccggcgcatgcgcagggcgaccctcccgcggtccctggctcgcgcatgcgcaccggggcccctggttcacccctccttatatataggttttccatgcggcatccccggcgcatgcgcactcgagtccccatcccataatccgcgtggcaacgccctgacaaccaaaaactcgccccgactgcgcatgcgcacggaaacgccgtcccattggaaatcatggttgcccaaatttggtaaaaatttgccccccccggttccggaggagaagggggggggtgaggggggggggttacggtggttcccgttccgccagtccgttttcgtagaacgtttcgttagaagagttatgctatatagggtatgcatcctaggggtggaagctaggctccgcccctgcggggcgtcgcctagcatccggtatacgtaaaacggactgatgacgtagctcgcttcgctcgctacgtcatcagagatgatttccgccggaggtggcgcacgcatacgtgacgtagctcgctacgctcgctacgtcatcgtatgtccggaattccacgggatgacgtatatccggagtgggtgtggtcacgcgagtgtgacgtaggcttgtcaggggtcacgtgagaagcggcggcgttaagtttactaggccaaaacagaggaagggggcggataccctaagtaagggggcgtgcacgtagccctgtagacactcccccctagggtccagtagcttatgacgcgtatccgggagtagcgtctacgtcagcaggtgtatatttccggtaaacggagaagcctgtacgtacaccgaggacggtggaaccctaacgggttccacctatctgaaatttccgtacaaggggtggagtctagggaggggtcattgtatattcgtttctgtgattggtagataaggtagcgtacctaggggtgtggatgtatacgtaagcggatatggctacacgtaatgggtgtggcttcactagggatcgctgtattctaccgcgcgcgtgcgtgcgcgcgcgtgacgtaacaaatcaccttgtgattatgacgttggcatctggcaccgcctcttgggcggttctacgggcctcgcttcctgcgcggatggtcacgtgaccaacaaaagtgctcaccgcctcgccggccacggggttgatgcctgttcttatgccgacaccagatggcgctcattgaccaggaaagctgtctacgcgggttttacagtgtgtttttgcgtcattgtgacgtagagccggcgatcgccacattcgatggtgtacgctcgccgccagatgtcgtcagattgtacccaaaaccccgttatgattacacgctggcttccgcattcttaggcacggcggtttcaggttacattacatcaagacgcgacaacgccccgaataaaaacaccgggcaccgttatgtatacacgacgtcgatactgatcgccgtagtgacgtcagtcgacacacaacaccgttccccatcacggtgtttcatggcaatgggcgaaagttactttttacaagacgaaaaatgtgttttttggtaaaaagagggggatgggaaaataaaaatacacaattttaaagttcggatcttttcctgttttattgactcgtaaactgtaaggtcttcgagtacgtgtcgggggtctgtgccgcgtacgtgttcgggaaaccacgttacgcggtttgtgtcgtgttgtaacgttgagataatacacacgtttggcgcccataggcgcgcaggtttttggggtgtgtaacttgtacggcgttttgtcggcggagcgcagcgaaagtcggtggtgatagcggcgattgaggttgcgagaccagatccaccgcgcttgtaccaccgtggtgcggtgtttctgcttgtaaaccgtcaggtggttctttgtgatttaaaaacaccgtgttcgcgaaacgtgacttttcacggtttgttagctgatgtgattttggaggccacaaacaccgtacggtgtttccggggatcgggctcgggatttgcctgtgtggcccggtgacggtaggacagaaaacaccgttttctagggacgttgttttcacgtgccctgtgtggggtttttatgtgctgcttgtgcgactgagtgggaaaacgggttgtgatcggacggtgtgctgaggataaacgacgtgcgcgactaccgacgttagtttgcggtgacgcgaagccgtcccgaacatcacgctattttcgcgggcgggtgcgtcggctagcggtctggctgcgagaggctgcccgaccgtaacggttagcttttcttacgaattgctgggatcgttgcggttgtcgccttcggtggtccgcaaccgcagccagaccgtagtggtggccacggtggtgtatcagacgtcgtgcgtcaaacatgacgtgctgaacttttccttggtataaaattcactcagtggcggcgtagccattgtcttccgttcatccaccatgagccacgaggaactaaccgcgctagcgccggtggggcccgcggcttttctctacttcagcaggttgaacgcagaaacgcaggagattctggccactctctcgctatgcgaccgttcctcgagcgtggtgatcgctcctctgttggcggggctcacggtggaggcggatttcggcgtttctgtgcgcacgcctgtgctttgttacgacggcggggtgcttacgaaagtcacgtccttctgtccttttgcgctctactttcatcatacgcaaggcatcgtggcttttaccgaggatcacggagacgtgcatcggctgtgcgaggacgcccgccagaagtacgcgttggaggcctacacgcccgaggcggatcgcgtgcctaccgatctggcggcgttgtgcgcggcggtgggctgtcaggcgtccgagacgactgtgcacgtggtggtgggcaacggcttgaaggagtttctctttgccggtcagctgattccatgcgtggaggaggcgaccacggtgcgactgcacggcggcgaggcggtgcgcgtgccgttgtacccgcctacgctctttaattcgctgcagcttgacgccgaagccgacgaggtctcgctggatgcgcgcagcgcttttgtggaggcgcgagggttctacgtgccggccgtaagcgagacgcttttctactacgtgtacacgtcatggtgtcaatcgctgcgcttctcggagccgcgtgtgctgatcgaggcggcgttgcggcagtttgtgcacgacagtcagcagtcggtgaagctggcgccacataagcgctacttagggtacatgagccagcgactcagcagtctggaaaaggatcatctgatgctgagtgacgcggtggtttgcgagttggccttcagttttgcctcggtatttttcgattcggcctaccaacctgccgagtctatgctcttttccgagtggcctttagtgaccaacgcaaccgatcaccgcgatctgatccgcgcgctgaccgagctcaagttgcatctctcgacgcacgtggccgccttggtcttcagcgctaattcggtgctctaccagcacaggctggtgtatctccagtcgtcggcgcggcatcccagcgccggcggtacggccagtcaggagacgttgctcaaggctattcagttcaccaacgggttgtcggcggcctgcgaagacgtctacaacgacgcgcgtaaggtgctcaagtttcaaggcgcgccgcttaaggacgaacgctatgggccgcagcatttggcgttggtgtgtggcacgtgtccgcagctagtttcgggcttcgtctggtatctaaatcgtgtctcggtgtataacacgggcttgtcgggttcgtcaacgctcacgaatcacctggtgggctgcgccgcggggctgtgcgaggcctgtgggggtacttgttgccacacgtgttatcagacggccttcgtgcgggtgcgcacccgcttgcccgtggtgcccaagcagcccaagaaggagccctgcgtgatcaccgtgcagtcgcgttttctcaacgacgtggatattttgggcagcttcggtcggcgttacaacgtcgacgccaaggacgggggtttggacggcaaaggtgacgacggggttccgggcggcggtgctggcgggggtggtggacgggacgtgagcgggggctcgagcgacggtctgggcggcggtcgtggtggtgggggtggcggggattccgggggaatgatggggcgcggcggtcgcatgctgggcgctagcgtggaccgtacctatcggctcaatcgcattttggattactgccgcaagatgcggctcatcgaccccgtgacgggcgaggatacctttagcgcgcacggcaaaagcgactttgtggccgtcttttcggcgctcaacaagtttgtggacgacgaggccctgggtttcgtttcggaggtgcgcctcaagagcagccgcgacgaggtggcgggcgccacgcaggccttcaacctggatctgaatccctacgccgtggccttccagccgctgctggcctacgcctatttcagatccgtcttttacgtgatccagaacgtggcgcttattaccgctacctcatacattgtggacaatccgttgaccaccaacttggtatccaaatggatgacgcagcattttcaatccattcacggcgcgttctccaccacgtcgtcgcgcaagggctttctcttcaccaagcagatcaagtcgtccaagaattcggatcacgaccgcctgctggactttaggctgtacgcgcagggcacgtacgccgtggtgcccatggagatcaagctctcgcggctgtcggtacccacgttgatcatggtgcgggtgaaaaaccgacccatctaccgcgcgggcaagggcaacgcgggtagcgtgttttttcgccgcgatcacgttccgcgtcgtaatccggctaagggctgcttgggatttctgctgtatcgacatcacgagcgactctttcctgaatgtggtctcccctgcttacagttttggcagaaggtctgttccaacgcgttgcccaagaatgtgcccataggtgacatgggcgagttcaatgctttcgtcaaatttctggtggctgtgacggctgactatcaggagcacgatctgctggatgtggcgccagactgtgtgctgagttacgtggaaagccgtttccataacaaattcctctgctactacggcttcaaagactacatcggctcgctgcacgggttgacgacgcgcttaacgacgcagaaccacgcgcagtttcctcacgtgttaggtgctagtccgcgtttctcgtcgcccgccgaatttgcgttgcatgtcaagggcttgaagaccgcaggcgtgccggcgcccatggccgccactgtggcgcgtgaatcgttggtacggagcgtttttgagcatcgttccttggtgaccgtgcccgtgagcgtggaaaaatatgcgggtatcaacaacagcaaggagatctatcagtttgggcagatcggctacttttcgggcaacggtgtagaacgcagccttaacgtgagctctatgagcggccaagattatcgtttcatgcgccagcgctacctcttggctacgcgtctggccgacgtgctcatcaaacgctcgcgccgcgagaacgtgctttttgacgcggatcttataaaaaaccgcgtcatgctggcgctggacgccgagaacttggattgcgaccccgaagtgatggccgtgtacgagattctgagcgtgcgcgaggagatccccgcgtctgacgatgtgctcttcttcgtggatggctgcgaggcgctggccgcgtcgctgatggacaagtttgccgcgttgcaggagcagggcgtggaggacttttcgctggagaacttgcgacgcgtgctggacgccgacgcccagcgattaacggacgccgccgggggggaggtgcacgacctgtcggcgctcttcgcgcccagtggcgtcggcgcggcgtccggcgtcgggggtggcggtcttctcggcgagtccgtcgcgggcaactccatttgcttcggcgtgcccggcgagacgggaggtggctgctttctcgtgaacgccggcgaagacgaggctggcggcgtcggcgggagcagcgggggcggcgggggcagcgggttattgccggccaaacgcagccggttgtaaccgccagcaaacgccgcgacaacggccgccgcagccacgagcatcgcaacaacagcagcaacagtcgcagcccccgtggccgcttttcagaccgcaacaacagcagcaacagcagccaccgacacagcagcaccaggcgacaccgtatcagctaccgccgcaacagcggcgacagacggcgtcgcatcatcaacagcagcaacagccccgaaggttagcgccgcggcaccagagacagagaccgccgccgcgctggcaaactccgacattcgcgtcggcgcccgggccgcctgaggaaggggaggagtgtcagacacagccggtcatctccgagcccccgtcgcccgaggcggaggagccggcggcggcggtggtggaggaggttgcgccgcaagcggcggcaacagcttcgggagcagaacccgcgtcgtcgacgacgtcgttatatattaacgtcaacgtcagtcggcatagcgagcggcccgcgagttatttgtgcaccgactccatgtctctggccggcgccagaccggacgacagcgtctcgtacgtgagcgagtcgagtcatggagatgaatttgttacagaaactatgcgtagtgtgttcgaaatgcaacgaatacgccatggagctggagtgtctaaagtactgcgatccgaacgtgttactggcggagtccacgccgttcaagagaaacgcggcggctatagtgtatctgtaccggaagatctacccggaggtggtggcgcagaatcgtacgcagagttcgctgctgacgctctatctggagatgctactgaaggcgctgcacgaggatacggctttgctggatcgggcgctgatggcctactcgcgccagccggaccgggcggccttctaccgtaccgtcctccgtttggatcgctgcgatcgccatcacaccgtggagctccagtttacggacaacgtccgtttcagcgtcagtctggccacactcaacgacatcgagcgcttcctgtgcaaaatgaactacgtgtacgggatcctggcgccggaggccggcctggaggtctgcgcgcagctgctggagctcctccgtcgcctatgcggcatctcgccggtggcgcgtcaggaagtgtacgtcgaagggacgacatgcgcccaatgctacgaggagctgaccatcatcccgaatcagggccgctcgctgaacaagcggctgcagggcttgctgtgcaaccatatagcggtccaccgtccgtcaagccagtccgatgtgaatatccagacggtggagcaggacctgctggacctgacaactcgcatcccccacttggctggagtcctttcggccctcaaaagcctattctcttcttcatcggcctaccacagctacatccaggaggcggaggaggcgctgagggagtacaacctgtttacggatataccggaacgaatatattccttgtcggattttacctactggtcccgtacctcggaggttatcgtcaagcgggtgggcatcaccatccagcagctaaatgtgtatcaccagctgtgccgggcgctcatgaacggcatcagtcgccatctgtacggggaggacgtggaggacatcttcgtgctcggggaaaaggcgttggacggggaggagcgcatgttcgtggggtcggtctttgccgcccccaacaggatcatcgacctcatcacatccctcagcattcaagctttcgaggacaacccggtgttcaacaagctccacgaaagcaacgagatgtacaccaaaatcaagcatattctcgaggagattcgacgtccgctgcccgatggcacggggggcgacggccccgagggcgaggctattcacctgcgtggacgggaggcgatgtcggggacgggtacgactttgatgacggccaacaacagcagcaacagcagtactcacagtcagaggaataacggtggcggcggccgggcccgtggaggaggcaagaaagctgtagggggaggggcgaatgggcaggacggcgacggcagcgagaacggcttacgggtgcgcaactgcgacgaacacgaggctctcgacttggtggacgcgcgttcccgcatccacaacgtcacccgcgaggtgaacgtgcgcaaacgcgcctacctgcagaaggtctcagaggtgggctatggcaaggtgatccgttgcatcaaaacgcaggagcgcctgactagcaaactcatcgatgtcaacctagtggggcccttgtgtctggactttatctctaagctcatgaatgggtttctataccgcagccaataccaccaggaccaagacgtggtggacgtgggggatcagttcacgtacgatgagcacctgtatgtggtcaataacctgatccacaagagtctgcctgtggaatccctcccgctactgggtcagcagatctacgagttgtgtaacgggcccctcttcacacactgtaccgatcgctatcccctctctcacaatgtggacatggcctatgcctgcgacaacgcgggcgtactaccccacgtcaaggacgatttggtcaaatgcgcggaaggtaccgtgtatcccagtgagtggatggtggtgaagtacatgggttttttcaatttttcggactgtcaggacctaaacgtgctgcagaaggagatgtggatgcacgtgcgggagctcgtgctctccgtcgcactatataatgaaactttcgggaaacaactctcgatcgcgtgcctgcgcgacgaactgcacccggacagagatgtgattctcacgtataacaaagagtggccgctgctgcttcgtcacgaaggaaatctttataagtccaaagatctatatctcctcctctacaggcatctgtccagaccggatgagagtggcgacgtgccaacagctcccgtggctaagccctccaccctgacggccgcggcggccgtctcgggtgccttcagggagccggaccgaccttggctgccaagtccgtacccctcctcctcgactgcgggcgtttcccggagggtccgcgcgacacgcaagagaccacgacgcgcctcatcgctgctggatttggcccgcgacgaacatggaatccaggatctggtgcctggtagtctgcgttaacctgtgtatcgtctgtctgggtgctgtggtttcctcttcttctacttctcatgcaacttcttctgctcacaatggaagccatacttctcgtacgacgtctgctcaaacccggtcagtttcttctcaacacgtaacgtcttctgaagccgtcagtcatagagccaacgagactatctacaacactaccctcaagtatggagatgtggtgggggtcaacaccaccaagtacccctatcgcgtgtgttccatggcccagggtacggatcttattcgttttgaacgtaatatcgtctgcaccccgatgaagcccatcaatgaagacctggacgagggcatcatggtggtctacaaacgcaacatcgtcgcgcacacctttaaggtacgggtctaccagaaggttttgacgtttcgtcgtagctacgcttacatccacaccacttatctgctgggcagcaacacggaatacgtggcgcctcctatgtgggagattcatcatatcaacaggcacagtcagtgctacagttcttacagccgcgttatagcaggcacggttttcgtggcgtatcatagggacagctatgaaaacaaaaccatgcaattaatgctcgacgattattccaacacccacagcacccgttacgtgacggtcaaggatcagtggcacagccgcggtagcacctggctctatcgtgagacctgtaatctgaactgtatggtgaccatcactactgcgcgttccaagtatccttaccattttttcgccacgtccacgggtgacgtggttgacatttctcctttctacaacggaaccaatcgcaataccagctactttggagaaaacgccgacaagtttttcattttcccgaactacactattgtctctgactttggaagagcgaattctgcgccagagacccacaggttggtggcttttcttgaacgtgcggactcggtgatctcctgggatatacaggacgagaagaatgtcacctgtcagctcaccttctgggaagcctcggaacgtactattcgttccgaagccgaagactcgtaccacttttcttctgctaaaatgactgcaacttttctgtctaagaaacaagaagtgaacatgtccgaccccgtgttggattgtgtgcgtgatcaggctctaaataagctacaacagatcttcaacgcctcgtacaatcaaacatacgaaaagtacggtaacgtgtcggtttttgaaaccacaggcggtctggtggtgttttggcaaggtatcaagcaaaaatctttgttggaactggaacgtttggccaatagctccggtgtgaactccacgcgtagaaccaagagaagtacgggcaatacgaccaccctgtcgcttgaaagcgaatctgtacgaaatgtgctctacgctcagctgcagttcacctatgatacgttgcgcagctacatcaatcgggcgttggcgcagatcgccgaggcctggtgtgtggatcaacggcgcaccctagaggtcttcaaggaactcagcaagatcaatccatcagccattctctcggccatctacaacaaaccgattgccgcgcgtttcatgggtgatgttctgggtctggccagctgcgtgactatcaaccaaacaagcgtcaaggtgctgcgtgatatgaacgtgaaagaatcgccaggacgctgctactcacgacccgtggtcatctttaatttcgtcaacagctcgtacgtgcagtacggtcaactgggtgaggacaacgaaatcctgttgggcaaccaccgcactgaggaatgtcagtttcccagcctcaagatcttcatcgccgggaactcggcctatgaatatgtggactacctcttcaaacgcatgattgacctcagcagcatctctacagtcgacagcatgatcgccctggacatcgacccgctggaaaacactgacttcagggtactggaactttactcgcagaaagaactgcgttccagcaacgtttttgacctcgaggagatcatgcgcgagttcaactcgtacaagcagcgggtaaagtacgtggaggacaaggtagtcgacccgctgccgccctacctcaagggtctggacgacctcatgagcggcctgggcgctgcgggaaaggccgttggcgtagccattggggccgtgggtggcgcggtggcttccgtggtcgaaggcgttgctaccttcctcaaaaaccccttcggagccttcaccatcatcctcgtggccatagccgtcgtcattatcatttatttgatctatactcgacagcggcgtctctgcatgcagccgctgcaaaacctctttccctatctggtgtccgccgacgggaccaccgtgacgtcgggcaacaccaaagacacgtcgttacaggctccgccttcctacgaggaaagtgtttataattctggtcgcaaaggaccgggaccaccgtcgtctgatgcatccacggcggctccgccttacaccaacgaacaggcttaccagatgcttctggccctggcccgtctggacgcagagcagcgagcgcagcagaacggtacagattctttggacggacagactggcacgcaggacaagggacagaagcccaacctgctagaccgactgcgacatcgcaaaaacggctaccgacacttgaaagactctgacgaagaagagaacgtctgaaccaggagaagaaaaaaaaaaacagacaaaaaaagtgacagagacttgtgatatacggggttaaactggatatctaggtgctgcatgtgtattttctttgtgattttgcttcgtaagctgtcagcctttcacggtccgctatgtttttcaacccgtatctgagcggcggtgtgaccggcggtgcggtcgcgggtggccggcgtcagcgttcgcagcccggctccgcgcagggctcgggcaagcggccgccacagaaacagtttttgcagatcgtgccgcgaggcgtcatgttcgacggtcagacggggttgatcaagcataagacgggacggctgcctctcatgttctatcgagagattaaacatttgttgagtcatgacatggtttggccgtgtccttggcgcgagaccctggtgggtcgcgtggtgggacctattcgttttcacacctacgatcagacggacgccgtgctcttctttgactcgcccgaaaacgtgtcgccgcgctatcgtcagcatctggtgccttcggggaacgtgttgcgtttcttcggggccacagaacacggctacagtatctgcgtcaacgttttcgggcagcgcagctacttttactgtgagtacagcgacaccgataggctgcgtgaggtcattgccagcgtgggcgaactagtgcccgaaccgcggacgccatacgccgtgtctgtcacgccggccaccaagacctccatctacgggtacgggacgcgacccgtgcccgatttgcagtgtgtgtctatcagcaactggaccatggccagaaaaatcggcgagtatctgctggagcagggttttcccgtgtacgaggtccgtgtggatccgctgacgcgtttggtcatcgatcggcggatcaccacgttcggctggtgctccgtgaatcgttacgactggcggcagcagggtcgcgcgtcgacttgtgatatcgaggtcgactgcgatgtctctgacctggtggccgtgcccgacgacagctcgtggccgcgctatcgatgcctgtccttcgatatcgagtgcatgagcggcgagggtggttttccctgcgccgagaagtccgatgacattgtcattcagatctcgtgcgtgtgctacgagacggggggaaacaccgccgtggatcaggggatcccaaacgggaacgatggccggggctgcacttcggagggtgtgatctttgggcactcgggtcttcatctcttcacgatcggcacctgcgggcaggtgggcccagacgtggacgtctacgagttcccttccgaatacgagctgctgctgggctttatgcttttctttcaacggtacgcgccggcctttgtgaccggttacaacatcaactcttttgacttgaagtacatcctcacgcgcctcgagtacctgtataaggtggactcgcagcgcttctgcaagttgcctacggcgcagggcggccgtttctttttacacagccccgccgtgggttttaagcggcagtacgccgccgcctttccctcggcttctcacaacaatccggccagcacggccgccaccaaggtgtatattgcgggttcggtggttatcgacatgtaccccgtatgcatggccaagactaactcgcccaactataagctcaacactatggccgagctttacctgcggcaacgcaaggatgacctgtcctacaaggacatcccgcgttgtttcgtggctaatgccgagggccgcgcccaggtaggccgttactgtctgcaggacgccgtattggtgcgcgatctgttcaacaccattaattttcactacgaggccggggccatcgcgcggctggctaaaattccgttgcggcgtgtcatctttgacggacagcagatccgtatctacacctcgctgctggacgagtgcgcctgccgcgattttatcctgcccaaccactacagcaaaggtacgacggtgcccgaaacgaatagtgttgccgtgtcacctaacgccgctatcatctctaccgccgccgtgcccggcgacgcgggttctgtggcggctatgtttcagatgtcgccgcccttgcaatctgcgccgtcgagtcaggacggcgttttaccaggctctggcagtaacagtagtagcagcgtcggcgttttcagcgtcggctccggcagtagtggcggcgtcggcgtttccaacgacagtcacggcgccggcggtactgcggcggtttcgtaccagggtgccacagtgtttgagcccgaggtgggttattacaacgaccccgtggccgtgttcgactttgccagcctctatccttccatcatcatggctcacaacctttgctactccaccctgctggtgccgggtggcgagtaccccgtggaccccgccgacgtatacagcgtcacgctagagaacggcgtgactcaccgctttgtgcgtgcttcggtgcgcgtttcggtgctttcggaactgctcaacaagtgggtttcgcagcgccgtgccgtgcgcgaatgcatgcgcgagtgtcaagaccccgtgcgccgtatgctgctcgacaaggaacagatggcactcaaagtaacgtgtaacgctttctacggttttaccggcgtggtcaacggcatgatgccgtgtctgcccatcgccgccagtatcacgcgcatcggtcgcgacatgctagagcgcacggcgcggttcatcaaagacaatttttcagagccgtgttttttgcacaatttttttaatcaggaagactatgtagtgagaacgcgggagggggattcggaggagagcagcacgttaccggaggggttcgaaacatcgtcagggggctcggacgaacggcgggtggaggcgcgggtcatctacggggacacggacagcgtgtttgtccgctttcgtggcctgacgccgcaggctctggtggcgcgtgggcccagcctggcgcactacgtgacggcctgtctttttgtggagcccgtcaagctggagtttgaaaaggtcttcgtctctcttatgatgatctgcaagaaacgttacatcggcaaagtggagggcgcctcgggcctgagcatgaagggcgtggatttggtgcgcaagacggcttgcgagttcgtcaagggcgtcacgcgtgacgtcctctcgctgctctttgaggatcgcgaggtctcggaagcagtcgtgcgcctgtcgcgcctctcactcgatgaagtcaagaaatacggcgtgccacgcggtttctggcgtatcttgcgccgtctggtgcaggctcgcgacgatctgtacctgcaccgtgtgcgtgtcgaggacctggtgctttcgtcggtgctttctaaggacatctcgttgtaccgtcaatctaacttgccgcacattgccgtcattaagcgactggcggcccgttctgaggagctaccctcggtcggggatcgggtcttttacgtcctgacggcgcccggtgtccggacggcgccgcagggttcctccgacaacggtgattctgtaaccgccggcgtggtttcccggtcggacgcgattgatggcacggacgacgacgctgacggcggcggggtagaggagagcagcaggagaggaggagagccggcaaagaagagggcgcggaaaccaccgtcggccgtgtgcaactacgaggtagccgaagatccgagctacgtgcgcgagcacggcgtgcccattcacgccgacaagtactttgagcaggttctcaaggctgtaaccaacgtgctgtcgcccgtctttcccggcggcgaaaccgcgcgcaaggacaagtttttgcacatggtgctgccgcggcgcttgcacttggagccggcttttctgccgtacagtgtcaaggcgcacgaatgctgttgagaaacagcggcggcggtggtgactggggacggtgatgatgctgctgagactgagactggtggtgagagtagtggtggggctgcgtcgcctgcgacggcgggtggagatgaggcggcgtggactgggacgaggaggaggggccgcagccgttggtggaaactacgtgcaacggcgacgcggttaagggagaccgtatcgcgtaggacgacgtggcctcctcgtataggttgttgccgctggactgacacagctcctgaatgagctctttgtagcgctcaaaggactcgctcacgtcgttgggaatgtccatctcgtcaatcttgcgttgcaaaatagtcacgtcgatcttgacgctgctggccgagacggcgtgacacagcacgctgataacgacgtggtcgcgcacgatgttgagcgtgacgctgtagtcttcgcgcgccgccgtgagcatctgcgtgatgcagtcgcaggggatgtgcacgtcggggttttcgaagatgacgtgcatgtgcaaccggccgtcctcggcgtgcataaagggcacgatgtcgtggttagcggcgtgcagcaggtaataaatttggaagatgggcggctggttggtggagagcttgagtagctcgctgctcttacagaacccgtaataaaagtttctatttttcatgatgttggacgtctgattgatgaaggccaccatggcgtcggaggcggtgggcaggatgcggttgtcctcgcacgaggtgcaggcgatgcgcgagacctgctcgttgccgtacggcgagatgtcgaggcaggtgtgctgccggtgcgagtggaaattgaagggtaagcagatggactctttgcccgtgatggccatcttcatcatgttgaggtacttgagctctagttcggggtgctcgcggaagatgtcgtgcaagtcgtgcagcgtgaggcgcgggcgcgcgtcggccggcgacggcggttcgccgtggttgttggccgacgtagcgccgttcaccgttgacgccactttgctggccagctcgcgttggcggcgcttgcggagcagggagcgcaaggccgagcgtcgttcgcgcggcgtgcgcacgccgctcacgctagacatacttgtctatcacgtacgtggggtccaccagcttgatgtcgcaattctccaacagctgcgtgaaatcgcgcataaagtccgccaggtgcactttgcctttgtaggtgcgttttgtaatctgaaaggccttgaagagtgtgatgcagagccacacacgtcgcggaagtcgacttatatagtaattgtcgtgacagatggccagtttcacctcctggacgtggtgggggtgcaggcgtccgaagagcacggcctcgttggtgacgcggatgttgccggcgcactgcgggtcgcagaaaaagtgcttgtagatgcccgtgacgcccgcctgacgcaggacgtggcaaaataccgggtcgggtcgcgccagtgcgccgtcgacgccgctcaggccgtgatagtccgagtcgcctccgggcgaggtgggcgcttcgagtccacagcgcgccacgtcctcgtgcgccgcgccgagtggcgacgtgcattcgcgcaacaggtcggccaataccagctgaatgcggtccaccatcttcacattgttctgacagtacgagacgacgcggcggtacagctcgcgcaggacgacgttatcgtaataggagcaggccatgagttcgcacagcagacacacggtactggtttggttcttggtaaaaaaggcgggtacgggacataggtaaatgggacccacgttcttttttagcgtgctctcgctgaaacccccgctggtgccaccgccgttgtgacggcccggatcgtcacctcttttttctcctccttcttcatcctcctcttcttccatcatcatccttgcgtcttctctttccgaggccgtggataacgcgtctagtcgcgcgaacttagtgtgcgtaagttccgtgagtggcgtggtgctcatgacgccggtgccggcccacatatagaaaagcagctgcacaaagcggtcgcggctaggtgagctgtgttctagaaagttgtcgatcagttcttgtggcacttcgacgtgataagggttgtttttttgcttctgttgcgggtggcgccgaggcttgttgtaaggcaccgtgtcttcgcccatgaccatggcccgcaccacggccagatggtttagggtgacattctcgttatcaaccgcgtcgcccacttgtttttcaaagcaacgatttatgaaaaagtgcaggtggaaatcgaagaccgtgagaacgtggtgtcggaacaggtcgtcgatgcgcagatcggaaaagtgctgctgcagcagatgcgtaaactcggacatgatgatgagcgtgctgagcgccgcacggggcgcgtaactgcatttgaagcacagcaagctgtactcgaggagccagctctggtcgcagtcctgtttgaggcagatgctgatgatggcgcataggttacagcgcgtgtcgatggccagcggcgcgcacagtcgccgcagttgttcaaagtcggccgccgaggtttcgaggccggccagttctgcatctaggtcgcaggcggccgaagcgccggcgggtcctgcgttactactgccggcgacggctccgccgcagctagtggtgttggtcgcattggtgagtacggtggattgcgtgccgccgcacgtggtttcttccgcacagcagttgagcagttcgtctacctccgaggtgccgaggctgagcgtctggaattcgtaatgacggtaacggttggcggggtgttgaggattcacctggtatgaggcggccgccgcggcggccagcgcttcgtccataggtacttgacgcgggtgcgcgtgccatagcagctcagttgtcaagtccgagtgccactgggtgtactcggtgctccagccgctgtaacgcgaaacggcctgtcgttgcggactgcacaaggtagcggcggcgacggagctggtggacggggccgggctggtcgggggaagaaacgtggtgtggggcccgtgagggggagtcgttgggccgttactgctcacgtgggtactcggattcatggcgatcggcgccgctgattgaggacgcggagaaagaatgtcctgggctaagcagcgggtgccgtttctggacgatgacgacggagaggaggaaaacgacgtgcaggatgacgtggattctccggtgccgacgcgaccgctggtgatcgacgaggacgcggagcccgcggctggtacgagcggtgggctcgaggggggaggtggtgacgacgaggacggtgaagacggacacgcgctacccgatcttgacgacgatctgctattacagttcgagccgatgctgccgcgcgtctacgatctgttgctgccctctctggacgcgcgcttaaatttcgtgaacgcgggtcagaagtacgccgccttcctcaagtacgtgcacggcgactgcgcgacctgcagtcacggagagatcctccgtgagaagacgcaactattaacggcgatcgtcagcaagcttatggacattaacggaatcctggagggaaaagacgagccggtgccgggtaaataaatcggcggtggcgtcggtgcgatggagatgaacaaggttctccatcaggatctggtgcaggccacgcggcgtatcctcaagttgggtcccagcgagctgcgcgtcaccgatgccggcctcatctgtaaaaaccccaattactcggtgtgcgacgccatgctcaagacagacacggtctattgtgtcgagtatctgctcagctactgggagagccgcacagaccacgtgccttgttttatctttaaaaacactggctgtgccgtctccctctgctgttttgtgcgagcgcccgtcaagctcgtttcgccggcgcgccacgtaggtgagttcaatgtgcttaaggtgaacgagtcgctcatcgtcacgctcaaggacatcgaggagatcaagccctcggcctacggagtgctgacgaagtgcgtggtgcgcaaatccaattcggcgtcggtcttcaacatcgagctcatcgccttcggacccgaaaacgagggcgagtacgagaatctgctgcgcgagctgtacgccaagaaagccgcgtcgacgtcgttggcggtccggaaccacgtcaccgtaagcagtcacagcggcagcggtccgtccctgtggcgcgcccgcatgtcggccgcgctcacgcgaacggcgggaaagcggtcctctcggaccgcatctccccctcctcctcctcctcctcgtcatccgagttgctctcccaccatggtcgccgctggcggcgccgctgccgggcctcggccgccgccgccacccatggcggcggggtcgtggcggttgtgtcgttgtgaggcctgtatgggacgatgcggatgcgcaagcgagggagacgctgatgaagaggaggaggagttgctggctctggcgggagaaggaaaggcggcagcggcagcggcgggccaggacgtcggagggtccgcgcgtcggcctctggaggagcacgtgagtcgtcggcgaggggtgtcgacccatcaccgtcatccgccgtctccgccgtgcgcgccgtccttggagcggactggttatcgttgggcaccgtcatcgtggtggcgagcgcgctccgggccatcgcgaccgcagtctgggccgtggctgcccgcgcgctttgcgactctgggcccgctggtgctggctcttctgctggtgctggctctgctgtggcgcggtcatggccaatcgtcgtctccgacacgctccgcacaccgcgactgacgagttccaccaggctctgtgccgtctcttcgcgcccctctgcgttcacgaggaccatttccatgtgcagctggtgatcggccgcggtgcgctgcagccggaggaagcggcggtagaaacgtcgcagccaccggcgcagtttgcggcgcagacgtcggcggtcctccagcagcagctggtgcatcacgtgccacgttcttgcgtccttcatctcttcgtgacggataagcgctttctgaatcgcgagctgggcgaccgtctctaccaacgcttcctgcgcgaatggctggtgtgtcggcaggccgagcgggaggcggtgacggcgctctttcagcgtatggttatgaccaagccctactttgtgtttctcgcttacgtctacagcatggactgtctgcacaccgtggccgtccgcacgatggcctttctgcgtttcgaacgctacaacaccgactacctgctgcgccgtctgcggctctacccgcccgagcggctgcacgcgttgttggacggtgtcaccgcctcgctgctaggtgaccttcaccgtttccttttcggggtggaccttcggctgcccgtgcttcaccccaccagctcgccgtgcctagcactactacgcgccaagcgcttcgacgtccgcgctgatttggccgtataccaccgtaaccagtggtgtcaccaacggcagccgcggtcgccgcagctgcggggcctcatcgcagccttgcgccggcacgccgggaaggtaccctgcggaaacccgctctacgtactggcccgacaagcggtgcagacgttttgcgacacgtgtccgcgatacctggtgccgttgcgggcactgggtctgcacgacgagacgcgcggaggaggctcgacggcggcagctgcggcggtaggacacgcgggcgccggacagcaggcgcgtcacgtagagcccaccaagatcgtcctctttgcactcagcgccgcgctgcgcggcggcctcatcggcagcgtcatcgacctgccgctctggtgtctgtgtcgactcaagtgcgagcgccatctggacgcgcgctcgctggtggccgtggtctgtcggcagtgcggacactgcctcaacctgggtaaggaaaagctacactgccagcaaaattttccgctcaactcgatgttctattatcgggaccgtcaagaaaagagcgtcatcttcaacacgcacgccgagctcgtacactgctcgctctgcggcagtcagcgggtggtgcggcagcgcgtctacgagctcgtctccgagacgctctttggacagcgctgcgtacgcgtgggctggaaagccgtgctgggcctcaacgcggcttgtgccgtgtacgatcaccggctggctttcgacgtcattctgccctgcgcggcacgcacctgcgactccactgtggtggtacgcggcgtgacggtcccgcgtctcctgcgcctcacttcgcacgggcacggcctgctgtgcgcgcgctgtcagacgggcgagtaccgcgacagctgtttggaaagcgaagacggcgccccgctgtgtcggggctgcgcgctggttaaacagaccgcctgccacgtcggcggccacattgtgcagcaggcgcgcggcggtttagcagcgatttcctcctcgtcctccccacacggcctgccccatgtctaacaccgcgccgggacccacggtggccaacaagcgggacgaaaaacaccgtcacgtcgtcaacgtcgttttggagttgccaaccgagatctcagaggccacccacccggtactggccaccatgctgagcaagtatacgcgcatgtccagtctgtttaacgacaagtgcgcctttaagctggacctgttgcgcatggtagccgtgtcgcgcacccgacgctgacagcccatggggaaaagtaacagcaataataaatcaccgtgaaagtgacacgttgttttatatcaaaaaaccataacaatcctcttgtttttattgcccgctactgtcagtgtcggttacaaaagatagagaaaccgcatgtgttgaatagtgtcctgtacggattgcgccagttgtcgcaggtccaatcgcactagtcgcaatatttctagagcactgaggacgttctgcgtgagcaccgtgataggcggcgaggcgaaactggtgctggcggcgccgggtgccacggccacaagttcatctcgacatagtggtgtttctcccagccggttttcttgaaagacggacccgccaaaggcggtggagactaatgcagagtcggctgtccttgatgtatcgtcttgtacgtgatgtatctgtccgtcgtcgtctgcggccgcggccgctcgatgacgatgtcggcgcggcggctgctgaactcgcgcgatgggtggcgggttttcacgcagaaactgaatattgactggtacgcggttgaaaggtaccggcggtgttggagcggcgccagacgcagcgacgttgtccgcggatgtgttatcatcttggtcatacagcgggaaggtggggaaggcctcgtccaacaccagccgactgtggtcctgttcgaacgtggagggcggtcgcagcacgcgtacaacggtgtggtcctgtgcgttgtaaatgactaggggaataaactctaagcgggtggggaaacgcaggtaatcgcgtagccgtctgatttgggcttgtagccagcagtgctccagcggcgtttcggtccacgtgtcctggagcagttgactgagattgaggtcccgggagcgttggatgcggaggaagtcgcggtctcgcgacgtgtattcgaggtggcgcgctactaatacacgttggcctttcagcaggtcggctacgtgcacgccgagacacacgggtatgccgaaaagccaggagcccagcgcgtagtctagggcggtttctgtttgaataaaaacatctaaaagtcctggctctgtggtcgtgtttgtgtctgtggtggttgtgtcttggcgtcgcacgcggatcatctgaagcaccggctctccggtggggagctgcggttgcgtgtacccctcggtcaccatctcgcattgttgcgtgaaaatctgaaacaacgtctgtaccaattcggacaccgaggcgtaggtctcggcgtactggggtttcagttctagccacagacactgcagcatgtcttgtggaaagaccagcgtggccatggcgtagagccatagcttgcctaggggtggtgtgcttttttgcgggcctacctggcacagttgctgtaccagtttattttcccaaaacagtttattgagctgcatggcgggccattgggtgggggtgatacagaaggccttgacctgttcggggaggtggtcggggggcattttgtgtgtgttattgactaccgcgtgtatcacatcctgatgtaggtgagctgtgagggagggtagtgacatttgcaccgggtacttgaggacggtgtagatgtactcggggtacagagctgctatgagtacacaaaactcttgcagacttaggcgcagcacggtaccgcggcccggtctctgttcccctacgtcaccaccctcgccgcttcctacgcgatcggcggccgtcagctcctgctgcgtgtcgatgcgctggtgccaggcggtgctcaccagataacaaaagagcttaagattatgtaacgtgtgagtctccgcggggtgcgtgtggctctgatgctgcgtgaggtagggtcgtaggtcgtactgcgagatctgcggccagaaagtgcgcaatgtctgacagacggccacggctaccgtgatggctttataacgtgtggtgacgacgttcttgagtcctccgccgctacagcggcgccgccatgccaggggccggccatcgtctcgcagcgccaagtacttaaaggctacgttgccgtaatcggtgaccaggtgaatgggttcgccggcctgcgtgacgatttgccgcatgccgaagacgtctaccacttcaaggaaggtgtcgtggtgacgcgcgaaacataggcgacgcaggcggtcgcgcattatcagcgcgggatcggtctcgtgcgttggcggaagcacgctaggaatgtcttccagcctatagactagcgatgagccgttgagcttgttgagcagatactggtgacccagctggacgtgtcgttccagcgcgttcaacccgcgtgtaaaggcgcccagcgaagtcgtcgcctgcggtttccgggggttgggcagggctccctcgttggagagacgcgtaccgcgtcgcttggccagttccgcaaaacgagtccgcagatcgcggatcttttccaactgcgaccgaaagtccagcccgtagctgaaggtctggattccgtgtaacagcgcaaagtattccgtcgccaacgtttcctgcagttctaggtcgcctagcgtctgacccaagcgctgcaacagttcctgcactttttgatgacgcgcggcgccgccggctacgcgtccgggttccagtcgctgccagaccgcttccaccgcctggaccatgtcgacccgcggcgtagacgcgccgttggcagtcgcctcttgatgctgtgcaataaaattttcacaggccgcgttttgttcgatttgatgcgctagcgtcacggcgctctcgacggcttgctgttgcaggttccggtagtgggtcctgcttccgtgatgcgggtgcgtagggtccgcggtgatttgcgcaagggcttcctccagaaaagccagcatccagcgcaccgtgcgctccgccgacaggtacggcagttgttgcgtggctttgcccaacagctcgcgaagtgtctccagcggcttttccatcagcgccttggcgtcgggggtggtcacgtccagtccgccgctcattttgtggcgcgtgaccagatcagtccacaggttctgcgccgtgctcagttgctcgtcgcgttgtcgcaactgcgtctgtactttctgattcagcagatcggcctcgtcgctgagcgctttccgggccgcgtcggcctgctgatctagcagcgttttgaaaacgggccgctggaagtcagcgggcgggggcgtgatccgacccgccagctcctgacccttgaagggtttctcgggtacacgcgtgacggagctgttcccgggatcctggcgcagcgagcgatctagccgttcgctagtctcggtcatctgttgtctagtctcttgtaactgtccctccatcttctgttgactgctgcggtagcgtgcaaagtcgccctcgaactcgctgcccgtgatggctgtagttggatcgccctgttgacacttctcgatgaactgcgcttgatggacggcgtgttgcagggcctgctgcgtctcatggatcagaagttgcggacccaaaatttggtccaagtggtttagcgaggcttgggtttgcatagccgcttctcggtgcgggtgacagcgccgctctacatcacccgtcagcacgccgtgcagacactcgttgattcgcccgtctagttttttgctcagctgctgcagcgccgacagcaagtcctggttgaacttgtctagtagcggttgggcgcgttgatctaggcccaagagcagctcgagtgtggcctccagtggttggtgcgggatggtggagagcatctcgcccttaacggcgtccaccacgcgttgcaaatcctgctgcacctttttttggtagccgtccagtagctgccgttgctgttcttcctgtttacgtttctccttgtctaaaaagtcttgcatcttggtggttaacgtttgttgcatttgatgcatgacacgatggctcggtgcccgggccaagacacgctgcacgtcctccacagaagttaccgtgagcttgccggcatcttcttgccattcacgttctagccgttccaggtgctgttcttccatctcgtgttgatatcgctcgtagagttccgttacctgaggtccgacgcccagtcgtccgaccatatgttgaaagaaatattcatgattacggaaaaagtaaaccaactcccgtaacgcttggaaacgtttttcggatgcgccggtaccggctttctcgatctgctccagtttcttgaccatctgcgcgtacgtggcgttggcggcacgcagatcctcacgttcgtgcgagtcgggtggcagttgctgcaacaacaaactgacggcgtcaaaaaacgtcggtcgcggcgactcgtcgcgcgccagtcgcatcactaatgtgtggaacatgctcagtacggcgttgatgagtcgcagacgcgtctgttcgtcgcgacgtaacatctcgcgtaattgtgggtgtcgcttgatggtctgttcggtgggcggatcgtcgtacgagagtccgtcgaggaaacgctgcgtttcctcttcctcttcgtagaggcggcttagcgcgagttgcgcgttctgtaggcgctgctgcacttcgggtagctgcaggccgcctagcgcttccagctgagctagctgctcctgtaccaaggccagtgtcagcgccgagccgcggctgcccgggtcgcgcaccagcgtctcgatgacatgaagcaggtcgtgaatctgcgtgaggcgaccctcgttttgctgcgtggcttgctggtacgcgtgtcgcagctgcaggatctcttgcagtagcggtacgttgtcgcgcacagtgcccgtcatgaggtagctcagttgttcgcgtatgacgacaaatccctcttcgtagctgccgtcacacagtttcaggtcgcgcaggtcgtaaaagagtctcagtacctgctcgacgacgcgttccatctgcttcaggtcctctaccggcaaaaagccgttgaggatgtgattgtgcacgcgcgttagcagctgcgtgctcagacggtccaggtccatctgcaactctagcattttggcgttgcccaggcgaaagagttcctgcttggcgttgtcgtccaacggctgcagcgctttcagaatttcgcgtcggttcagatcgctggcgtctaggtcgtgaatgtcgatgctggtgatgaggccggccaagtgctcgtaaacgccgtggtactcctcgcgttgacgttgcaacacccgacgtcgctgttcgatgacctgcgtcagacgctgaaagtctacgggtcgcaggcagacgaagctgtcgctaacgggcatcggtcgcttggttacgaaacgttgcagtcgttgagacagttcgttagtgggcttgctttccacgtagcgtagcatctcctccacccaggcgatgagcgccgggccgtgctgacgtccgtagggatcgaagacgacttgcatcttctccagcagtgcgcgatccagcgtcgagtacgtgcctttggtggtcttgtggctcaggtagtcgtgcatgcgccgcagatccaggccgtggtgcagccagttgagcagaaaggcatccaatttcttggataggcccagataggcgcgtaccgcctgctgcgccgccgattgcggaccgcaggggcgacgcagacacgagcgctgattgacggcatggatgatgagctgctggagacgatcggtgaggaaagcttcgtcgaaggacggcgccgtggccgttgccgcgttagcgccgctttcggtacccgccgcgtgcaacgtccaggcgctggtgttggcaggcaacggcggcagcgtcagagccttcaactcctgctctacctcgtcgaccagctgttggtagcggcccagggccggcagggccccttcgccgcagctgtaggacggtggtaccgcggacgaagaagaggccgccgctatcgctgaggaggaggaggcggtggccagtgttttggacgtcgtggacgggggtttctttttgcctccgtgtttgctaccgctgaggtccttgcggcgtttctcgggtgtttttttgggtgaggacgagggatcgtagacgggaatgctgggcgccacgccaggagggcagcccgggtcgacgatggggtcgggcagcggaggtaaggaaggtgcggcggtggtcgttgtcgccgccgtgtccgcgctttctcgaacgacgccggtgaggtcgatatcgcggtcgcgataggtggagaccaaacgtgcggcgatctcagcctctggcacggtcgccacatccagcatgtagagaaaaagggcctcatagtagaaagcgggcgatagctgcacgccgaagcccgtgagcaccatcagcacctgatggagaccctcgcagtgatacacggcggcgttgtgacattccgcggagctgtgcggatcaaagaccaacatgtggtcctcggtgaagaccacggcgcgcgccaacgagttgacggtgacgagtacgtaggtgggacgcggtttggcgtgcgcgtaccgcagaaagtcgaagatgcccggacacatgtagccgtccaggtcgcacgtctcggtggtgccgttgaagggccgcgagagcgcgtgcacggtccggccgaaccgcgactccaggcggcgcggcacttcgtcgcccagtcggtagaccggcagccgcccgccggcgggcagcttcttttgcaactcgcgctctagccgcgcgtccagacgcgcgccctcttccatgatggcgtccagcgcctcggtctgcaggacggcgctcgttccacccaggtgcaaggcgtgtaggaacatgatgccgttgcagacgcattgattgcccgctcgcgctccaaagcgagcgatgtcgccctggtggcagctggcctgcgtgactttcatggcgaggccggcggcagggacaccgatgtcgagccggcgggcgggtcgatcgaagacaagatgtcctgctgcgcctggcttacggggacgatgtaccagtttaataggtcgctcgcggccaggtgtgcgggttcgtagcgcgcacccaggacctccggtacggacgtcgcgcctgccgtcgattcttcgtgatcggtgtcgggcgtcatgcggagtcgcggcggttggggcgccgattcccagggcgcctccaagaactcgcgtaaggcgcgatccgcttcggccgccgccgcaacgcccgtgcccgcgggccaggtcatcggcgctagcgcgcgatgtcggtgcagtaggctcgtcgcttccgtcagacagagctgtgcgccgcggcgttccaagttctcgcgacttagtacgtcaaagacggctagcgcgcgttgcaccgcggtaacgacggcgccattggaacgttgcgcctgctcgagcgccaatgtcacgcgtgtttccaacactttgattttggaggccgtctttttgagcgccttgctcatctgggccaccgtgcggtgacccttggcgtgtcggcttacttcctctgtgtcgctgctgatctgacgtacgcgcacgcgaacactcagcaggcgctcgtttaagccgcgcagattctcggccaacagccgatcgcggcgaaccagttcgcgcaactgttctacgaaacgcgtggtaggtacgcgcagtccgtactgaccctgtacctccacgtacaccgtcacgccgtcctccgagaggcgcgcccggccgcgcgccagaccgaaacagagtcgcgtgtgtcgcagatagtttctcagactgccggcgctgctgcgcatcacgtcctcgatcagcgggttgacggtggtgtacaggttatgcgctacggagcgcgccatgagctcggccagcaggtccacattgggcgtgacgggtacaccgctgaggtgctcgagggtcgtggcgatgtcgaagacgcaatcgcgtaccgtcttaaaaaccgcggcgtcgatgtgcttgacaaaggtggtcaggttgtaaatggagaccaggttctggtacagcgtcacctgctcgggcaacaatacacgacacagctgaatgagcgcgaaaagacgcggcgaacccacggcttgaaacaggccctgcgggataccaaagatctccgaaaattcagttaccaccaccaactgcgcgaagatgctggggaactcgggatgatggctgaaggctagcagggaggcgtagttgacgcggccttcgttcagattaacgagcgcgcattcgcgtaagatgtcggagcgtgtgacgccgtcaagcggaggcaaaggcgaggccgcgccggccgcgccgcgagacggacgcaaggtaaacaggtgcacgccccacttgctgtgcaggtcccgatacaggtactcgcgctctgcctccgtggcacccttcgtatgtgcctcaaagtcttcttccgtgtactgaaccgcaaagtgcgtattgacgttcagtgtcacgttgctccagacgtgctgtagttcctccttggagccgatcaacgtggatcgatgctgctccaaaatcaaccgccgccggtggtcgaacaggaacgtggggctgtacacatagaggcacatgaaaaacgtgtaaaaattgtagatgatctgtatgagtttctcgcgaatctcgctgacaaagagcgagctcttctgactggccggctggatcagcgccatttgtgcgtaggccgcgcaggtatcgtgattgaaacccagttccaccagtagcgttaccatctgcgtcagatccagtagccgctgcacgcgtcgcggcgtatgcaagtggtcttccagcacgcgatcgcacacgcgcgcgtaagcgtctaggttggcgcgcggcgaaacttcctcactcaacagacgcgagatcagacccgggtggaaaaacatacgttcgggcgacaggtaaaggttcacggtggagatgcgcgtgctaatgatgggaaacatgaggccgctggcgtcacgcgcctgcagattacccacgaacagcttgtagctgacgtcacgcatgtgttcggcaccgggcttctggtcgccgtcgatatcggaactgacgaaagagctcatgtgccgcacgctgttcttgacgtagttttgaaactccacggccaaatcgccgttaaccgaacggtagtgtgtgtaaaaaaaatgcatcagaagcaccgtgtccagttcggtgtcggtgtcgcgccgaaacaacacgtagggcatgagcgtgcaggcccagtagatgagccgctggtaggtcaggtccaggagttcggccacggcgcgacaattgacgtagggccgcgcctccgtggcagccgtttccagctgcgtgatcacccggcgaaccagcggctgctggcccccggaactcgaaccgcccttcttgccgcggcgctcggtcgacgcgttgttactggcgatcaagtccgccgccgccgcggtgccgccgctctgttcggctattacggtctggatctcgcgcagggtctgcaacagcttctggaaagccgtcagcgtggccccgttgtggtagaacggcaaccggtcctcgtctccgccgccgtcgtgctggtgtcgcaggaagcggtccagctgttcgtgcaactgctcggcggcgtacagcgggtcgcgcgccgtctgtaccgtggcgtggcttaggaggtaaaagaccacgttctgacgcacgaaggcaaagtggtaacccgagctcggcaacgcacccacgaaggcgcgcacggcgctcgcggtcacgtcctgggcatccaccgcgccgatctccaattggctcacggtatttaacgcctccgctttgtccgtggcccgtgcccgcagctgctctatcaactttttgaaatctaccgtgcgccttgccatcatggacgcgcgcgcggtggccaaacggccgcgcgacccggccgacgaggacaatgaactagtgacggcgctcaaagccaaacgcgaggtaaatactatatcggtgcgctacctctaccacgccgatcaccaggcgctcacggcgcgtttcttcgtgcccgagggcctggtagagttcgaggcgcagccgggcgcgctgctcatccgcatggagacgggttgcgactcgccgcgacacctctacattagcctctacctgttaggcattcgcgcctccaacgtctcggccagcacgcgctgcctgctcgaaagcgtgtacacggcctcggccgcgcgcgccgcgctgcagtggctggacctgggcccgcatctgctgcaccgccgcctcgagacgctgggctgcgtcaagaccgtctcgctgggcatcacctcgttgctcacctgcgtcatgcgcggctacctttacaacacgctcaaaacggaggtgttcgcgttgatgataccgaaagacatgtacctgacgtgggaagagacccggggacggctgcaatacgtgtatttaatcatcgtctatgactatgacgggcccgaaacacgtcccggcatctacgtgctcacctccagcatcgcacattggcagaccctggtcgacgttgcacgcggaaagttcgcccgcgagcgctgtagctttgtcaaccgtcgcatcacgcgcccacgccagatccctctgtgtaccggggttatacaaaagctgggctggtgcctggctgacgacattcacacctcgttcctggtacacaaagaactcaaactgtccgtcgtccgtttggacaactttagcgtcgaattgggagactttcgagaattcgtctgagcggcgctgacagcatacgaggaggagacacagaagaaaaaataaacacagcgcacacagactttataaaccgtagttatcggtgccatatagacacactttattgaaatctacctgatttctttgttcttttcctcgtaaacttatgactccggctgacgcggacgaggaacagcgggtgtcctcggtgcccgtgtatcggtgccggccaggtaggattccgagccgcggcgcggaaaccgagacggaggaatcgtcggcagaggccgtcgctgatactaccgggggagatgacagcgagctcgaggaagggccgctgcccgggggtgacaaggaagcgtccgctgaaaataccaacgtgtcgagcggcgtagcgtgtgtagcgggttttacgagtggtggcggcgtcgtcagttggcgtcccgagtcgccgtctcccgacggcacgccgtctgtgctgtcgttgacgcgtgatagcggtcccgccgtgcccagtcgtggtggacgcgtgagtagcggtctgagcaccttcaatccgaccggcgcgaccaggatggagctggacagtgtcgaggaggaggacgatttcggggcttcgctctgcaaagtatcgccgccgatacaagctacgcgcatgttgatgggcaaaaagtgtcattgtcacggctactggggcaagtttcgcttttgcggcgtacaggagccggcgcgggagctgccgtccgacaggaacgcgctgtggcgcgagatggacaccgtgtcgcggcacagtgccggtttgggcagtttcaggctatttcagctcattatgcgccacggtccctgtctgattcgtcactcgccgcgttgcgacctgctgttgggtcgcttttatttcaaagccaactgggcgcgtgaaagccgcacgccactgtgttacgcttcggagctgtgcgatgagtcggtgcgccgttttgtgctgcgtcacatggaggatctacccaagctggccgaggagacggcgcgttttgtggaattggccggttgctggggcttgtacgcggccattttgtgtttggataaggtgtgtcgccaactgcacggacaggacgagagcccgggcggcgtgtttttgcgcatcgccgtggcgttgacggccgctatcgagaacagtaggcactcgcgcatctatcgtttccatctggatgcgcgtttcgagggcgaggtgttggaatcggtgttgaagcgctgtcgcgatgggcagctgtcgctgtccaccttcaccatgtctaccgtgggtttcgatcgcgtgccgcagtacgactttctgatctcggccgaccctttctcgcgtgacgccagttgggcggccatgtgcaagtggatgagtaccttgagttgcggcgtttctgtgtcggtgaacgtaacgcgacttaacgccgatgtgaacagcgtgattcgttgcctggggggatactgcgatttgatacgcgagaaggaggtgcatcgacccgtggtacgtgtgtttgtggacatgtgggacgtggccgctatccgcgtgattaactttattctcaaagaaagcacgtcggagttgacgggggtttgctacgctttcaacgtgcctagcgtgttaatgaagcgctaccgtgcgcgtgagcagcgctactcgctgtttgggcggcctgtctcccggcggctctcggacctgggtcaggagtcggctttcgagaaagagtattcgcgctgcgagcaatcgtgccccaaggtggtcgtgaacacggacgattttctgaaaaagatgttgctgtgcgcgctcaagggccgtgcctcggtggtctttgtccatcacgtagtcaagtactcgattatggccgacagcgtgtgcctgccgccgtgcttgagtcccgatatggcgtcgtgccactttggcgagtgtgacatgccggtgcagcggctgacggtgaacgtggctcgctgcgtgtttgcgcgtagcgacgagcagaagctgcatctacccgacgtggttttggggaacacgcgacgttactttgatttgagcgtgctgcgcgagttggtgaccgaggcggtggtttggggcaacgcgcgcttggacgcgctaatgtcggcgtccgaatggtgggtagagagcgcgctggaaaaactgcgtccgctgcacatcggcgtggctggcttgcacacggcgctcatgcggttagggttcacgtactttgcctcttgggacttgatcgagcgcatctttgagcacatgtactttgccgcggtgcgcgctagcgtcgatttgtgcaagtcgggtttgccgcgctgcgagtggttcgaacgcaccatctatcaagagggcaaattcattttcgaattgtatcggttgccgcggctctccatcgccagcgcgcgctgggaagcgctgcgcgccgacatgctcgagttcggattgcgcaactgtcagtttctggcggtgggtcccgacgacgaggtggcgcatctgtggggcgtgacgccgtcagtgtgggcttcgcgcggcaccgtgttcgaggaggagacggtgtggtcattgtgcccgcccaaccgtgagtgttacttccccaccgtggtgcggaggccgctgcgcgtgcccgtggtgaattacgcgtggttggagcagcaccaggaggagggcaaggcgacgcagtgtctgttccaggcggcaccggcgatccaaaacgacgtggaaatggcggccgtgaacctgagcgtgtttgtggaccagtgcgtggccctggttttctactatgactcggggatgacgcccgacgtgcttctggccaggatgctcaagtggtaccactggcgctttaaggtcggagtatataagtactgtgcctcttagtcgggggcccgctggctcggcgcggctgtattattagacgccgggcgtcttcgcagcgttcccggtcgtcgtgtgtgctctctataaaactttcgctcgctcgcgcccgctccttagtcgagacttgcacgctgtccgggatggatcgcaagacgcgcctctcggagccgccgacgctggcgctgcggctgaagccgtacaagacggctatccagcagctgcgatctgtgatccgtgcgctcaaggagaacaccacggttaccttcttgcccacgccgtcgcttatcttgcaaacggtacgcagtcactgcgtgtcaaaaatcacttttaacagctcatgcctctacatcactgacaagtcgtttcagcccaagaccattaacaattccacgccgctgctgggtaatttcatgtacctgacttccagcaaggacctgaccaagttctacgtgcaggacatctcggacctgtcggccaagatctccatgtgcgcgcccgatttcaatatggagttcagctcggcctgcgtgcacggccaagacattgtgcgcgaaagcgagaattcggccgtgcacgtggatctagatttcggcgtggtggccgacctgcttaagtggatcgggccgcatacccgcgtcaagcgtaacgttaaaaaagcgccctgccctacgggcaccgtgcagattctggtgcacgccggtccaccggccatcaagtttatcctgaccaacggcagcgagctggaattcacagccaataaccgtgtcagtttccacggcgtgaaaaacatgcgtatcaacgtgcagctgaagaacttctaccagacgctgctcaattgcgccgtcaccaaactgccgtgcacgttgcgtatagttacggagcacgacacgctgttgtacgtggccagccgcaacggtctgttcgccgtggagaattttctcaccgaggaacctttccagcgtggcgatcccttcgacaaaaattacgtcgggaacagcggcaaatcgcgtggcggcggcggtggtagcggcagcctctcttcgctggctaatgccggcggtctgcacgacgacggtccgggtctggataacgatattatgaacgagcccatgggtctcggcggtctgggaggaggtggcggcggtggcggcaagaagcacgaccgcggtggcggcggtggttccggtacgcggaaaatgagcagcggtggcggcggcggtgatcacgaccacggtctttcctccaaggaaaaatacgagcagcacaagatcaccagctacctgacgtccaaaggtggatcgggcggcggcggcggaggaggaggcggcggtttggatcgcaactccggcaattacttcaacgacgcgaaagaggagagcgacagcgaggattctgtaacgttcgagttcgtccctaacaccaagaagcaaaagtgcggctagagcgcgtgcccgggaacgcggcccgcgcgcacggcgcggtcccgcgatggagaaaacgccggcggagacgacggcggtttcagctggcaacgtgccacgtgactcaatcccgtgtataactaacgtgtccgcggacacccgcggccgtacccgccccagcagaccagccaccgttcctcagcgacgtcccgcgcggatcggacactttaggcggcgcagcgccagccttagctttcttgactggccggacgacagcgtcacagagggcgttcggacgacctccgcgtcggtcgccgcctccgcggcccgtttcgacgaaatccggcgacgccgccagagcattaacgacgagatgaaggaacgcacgctggaggacgcgctggctgtcgagctggtcaacgagaccttccgctgctctgtcaccgccgacgcccgcaaggacctgcagaagctggttcgtcgcgtcagtggcacggtgctgcgtctcaactggccgaacggttggttcttcacctactgcgacctgttacgcgtcggctactttggacatctcaatattaaaggtttggagaagaccttcctgtgctgcgacaagttcctgctgccggtgggcactgtgagtcgttgcgaagccatcggccgcccaccgctacccatactcatcggcgagggcggccgcgtctacgtctactcgcccgtggtggaatcgctgtacctggtgtcgcggtccggtttccgcggcttcgtgcaggagggcctgcgcaactacgcgccgctgcgcgaagaactgggctatgcccgcttcgagaccggcggcgacgtgggtcgcgagttcatgttggcgcgcgacctgctggccctgtggcgcctgtgcatgaagcgcgagggttccatcttcagctggcgagacggtaatgaggcgctgacgacggtcgtcttgaacgggagccagacttacgaggatccggcccacggcaactggttaaaagagacgtgctcgctgaacgtgctgcaggtatttgtggtgcgggccgtgccggtggagtcgcagcagcgcctggacatctccatactggtgaacgagagcggcgccgtcttcggcgtgcatcccgagacgcggcaggcgcactttctggcgcgcggactcctgggcttctttcgcgtcgggttcttgcggttctgcaacaactattgcttcgcccgcgactgttttacccaccctgaaagcgtggcacccgcttaccgcgccaccggctgtcccagagaactgttttgccgtcgtttgcgcaaaaagaaggggctctttgctcgaaggtgagccgcggacgccgtcggtaccgtctccaccacagttgccaccgtcgccgtcactgccaccgacatggagcccacgccgatgctccgcgagcgggatcacgacgacgcgccccccacctacgagcaagccatgggcctgtgcccaacgacggtttccacgccaccgccgccaccacccgattgcagcccaccgccctatcgacccccgtactgcctggttagttcgccgtcgccgcgacacacgttcgacatggatatgatggaaatgcccgccaccatgcatcccaccacgggggcgtactttgacaacggctggaaatggacttttgctctcttagtggtcgctatattagggatcattttcttggccgtggtgttcaccgtggtgattaaccgggacagtgccaatacaacaacgggggtttcctcatcatcggggtaacggggatagagcatgtgcttgactgtaccatcattgctgctacggaataataactacgctacgacctggcctgtggtgtgtgttgttttttgtgcacgcacgacatgacactcttttgccgcaccgccaacagcaccgccggctacgtcgacatgaacgtctgcatcggcatgatcggcgtggtttgtttcgttttcggggtctttattctcatcttttgctccacgttgaaagctttctacgtgcggcaaaagacttaccacctcctgggtaccgagtcggacgacgaggagaccacggtttgggaaaagcgccggatggagtcggatacagacttttaaaagaagccataaaaatatgggaattcccctgcctacgtcttcatgacgggcgcctttttcttcgcctcgggctctgtctcgtcgtcattcgggccaggactttttaatggccaacagcctgtggcaccgcctccgaacgctcgtgggcaacagtcggcagaatgaacaaattcagcaacactcgtatcggcttcacttgcgcggttatggctccgcggactttagttctgacgcttggactcctgtgtatgaggatcaggagtttattgtcttctcctgccgagacgacggtaacaaccgccggcgtgacgtccgctcacggtccgttatgtccgctcgtgttccagggttgggcgtacgccgtgtaccaccaaggcgacatggccctcatgacgctcgacgtgtactgttgccgccagacctccaacaacaccgccgtcgcgttctcgcgtcatcttgccgttaacacgctgttgattgaagtgggtaacaacacacatcgccgcgcagatggagtctcctgcctggaccattttcgcgcgcaacaccaggattgcccggcccagacggtgcacgtgcgcggcgtaaacgaaagcgcttttgggatcacccacctgcagtcctgttgcctgaacgagcattcacaactctcggagcgggtggcctaccatctgaagctgcgacccgccacgttcggtctggagacctgggccatgtacactgtgggcattctggccctgggctcgttctcctccttctattcccagatcgctaggagcctgggggttctgcccaacgatcatcactacgccttgaagaaggcttgataatgataactgcacatcctcacgagtgcccttacctatcatcacactaagaataaagaaaatcgatcggtgtcgtgacgtgtggtgtgtgtttttcactgttatcgggtaccagggaggaggggttaagaggtcacaggtgcgatttaccgtaaggagagtcacacttaagaaaaaggtggaaatccctcacccgtcttattcccgtcagccgtcagtgacgtgaatcgcccctcacgtcagtgttgtcccctatccgcgtgagttgggtggctcaccgtcaggtgctccgagacgcgcgtactcggaaactgcgtcaatgcggtcggtcagccgaccctttgatgtagtacatcgcgtgcgaagatgaaaaacatcttaaaccgggtcgcctaaggggaaaaccccacgtgtcttgggcgcgtcatgtccggcatcttcatgtatataagacggtgtttcaagacgacgtgagacccacacgcgggtttcacttctttctttaattatgtctccagtctacgtgaatctgttaggtagcgtgggcctgctggccttttggtactttagctaccgctggatccagcgaaaacgccttgaagatcctctcccgccttggttaagaaagaaaaaagcatgtgcgctcacccggcgttctcggcaccggttacgccgccaacatggcgtaattgacggtgagaactcggagaccgagcggtccgtggacttggtggccgcgctcttggccgaggccggggaggagagcgtaacggaggacacagagcgggaggacacggaggaggaaagggaggatgaagaagaagaaaacgaggctcggacgcccgaggtgaaccccatcgacgccgagggcctctcaggacttgcgcgagaagcctgcgaggccctcaaaaaggccctgcggagacaccggttcctgtggcaacggcggcgacgagctcagctgctgcagcacaacggcccccagcagtctcaccagtaagcaggggtaaacaaaaaaaccacagactccgggatagtataagaagggactttaccgctattgctgctattcatagagaaggatagaaaggatgactacgaccacgcatagcaccgccgctatcatgagcctgctggacgaggccgagtggcgacagacgcagatggacgtggggggactgatccaggcgtcggcgttgggcaaggtggcgcttcgctacgcggtgaggaaactgatgaagcgcggagccaggctgcggcacgactcgggtctctacgtgtgcatctgcgacccctcctacgagtttctgcagatgaacctgagcaagatcagttggctggagcgacactgccccccgttggaccaggagctcatcatgttcggggtcatcgaggcctgggaggaagcttcggtgcggcccacgcgtcagctggtgttgttcatgacgcccaagtgggacgtgttcgcctacgactccggtatcctgtttttcctggcgcccagcatggcgcagttctggcacggtgccatcgtgctggagtattggaacgctttgttcccggtggaggtgcgctcccacgtccgtcagcacgcgcacactatggacgacctggtgatggtcttccaccagctggactacgaaaagcaggtgctggaagcgcgtcgcgacaagaatacggaggggccgcgcacttttgccaagtcggtgaacagctacgtgcgcgccatcctggaatctgagcggcggatccgcgaagggaaaattcctatgaccttcgtggatcgcgactcgctgcgagccaattcgttggcccacatccaggccaccggggctcagccttctcacgccccggcgcaacgggtgctgtccgcgccgccgagtttgccgtcgcccgtgtcggaagaagaccccgctgccgccgccaccccttcgtcctccgccgccaccacccccccgtcctctgtcgtcccgacctccgtcgagagcgagttgtcctcgtcgccgccgctgccgccggtcgtggtgaaggatgtgatgtacacggccggggagggcgacgtggtacagatggtggtcgtggtctagaaggagaactttgctgctagatgaccatgttcagctttttttttgtagtattttttcatagttgctatacctcagttatcccccctattagccccacatgctgcttaataaacatacttgtttcattttctttctagtgccgcggttttttgtcgcgtccacgggctgcgcgggtttcaggtaaaaacaacgtgtgtgataaacgtgggtttttacctacgggaaaggggagggtagaaatgtgagtcttcgtcaataaaaagtcccgtgtcgtccccacgtaggtttctgtgtggctgttgttgacgctgctttggagcacgggaaacggtgtttcggtccgctgtacgtaccacggcacggacattaacatcacttccaacactacgagtatgaactgtcagttaaactgcacgtgcaataatacgcaaatctacaacggcccctgtgtcgggaccgaagccagactacccttgaatgtaacgtttaaccaatcacgacggcaatggcacagcgtcatgcttaaatttggttttcagtatcatctggaaggctggtttcccctgcgtgtgttgaacgagagccacgagaccaacgtcacggaagttcacggagaagtcgcgtgctttaaaaatgacacaaacataaccgtgggacaattgatgctcaacttcaccggccacagttacgtgttgcgagcggtagcacatacgagtccgttcgaatcacacgtacattgggaagaaaccaacgctactagtaacatcactagtaacgtaacttctttggaaaacactaccactgtgatgttaacactggcgaaatacgcggaaagtgattacatctttctacaagacatgtgcccgcggtttcttagaagaacccttaagcttacaaaaaacaaaacaagaaacgcaacatttacgggaactaatgtgacgtcgcttcccatgtggacaccgaaatgcgacggatggaagtattggatcacgctatccatgatgtggagaaaccgccgttcggctctgctccgagccaaaagtcgcgcattgggacactgggcgttgttgagcatatgtactgtagcggcgggcagcatcgcgttgctcagcctcttttgcatcctccttatcggacttcgtcgcgatttgcttgaagatttccgctacatttgtcgggacgaggggggttccagcacaaaaaacgacgttcatcggatcgtctgacgtcaacgctgatagtgtctataaaggccgtgccgccgcgccgtagttctccgaaggcggacggaggagtctgtcgaccgcagcggtggctggagaagcgcagcgtcggcgagcgaaggtagaggagtccgtcatggacgacctacgggacacgctgatggcctacggctgcatcgccatccgagccggggactttaacggtctcaacgactttctggagcaggaatgcggcacccggctgcacgtggcctggcctgaacgctgcttcatccagctccgttcgcgcagcgccctggggcctttcgtgggcaagatgggcaccgtctgttcgcaaggtaagccccacgtcgttgaagacacctggaaagaggacgttcgctcgggcacgttctttccaggtgttttcaacgtgcgtggattttttctctctaccaggtgcttacgtctgctgtcaggagtacctgcacccctttggcttcgtcgagggtccgggctttatgcgctaccaactcatcgtgctcatcgggcagcgcggcggcatctactgctacgatgacctgcgcgactgcgtctacgagctggcggccaccatgaaggactttctgcggcatggctttcgtcactgcgaccacttccacactatgcgcgactaccagcggcccatggtgcagtacgacgactactggaacgccgtcatgctctaccgcggtgacgtggagagcctgtcggccgaggtgaccaagcggggctacgcttcctacagcatcgacgaccctttcgatgagtgtcccgacacccatttcgccttctggacctacaacacagaggttatgaagttcaaggagacatccttcagcgtcgtccgcgcgggcggcagcatccagaccatggagctcatgatccgtaccgtgccgcgcatcacctgttaccaccagctgttaggcgcgctgggccacgaggtgccagaacgcaaagagttcctcgtacgccagtacgtcttggtggacactttcggcgtcgtctacggctacgaccccgccatggacgccgtctaccgtctggccgaggacgtggttatgtttacctgcgtcatgggaaagaagggacaccgaaaccaccgtttcagcggccggcgtgaggccatcgtgcgtctggaaaagacacccacctgtcaacatcccaaaaaaacccctgaccccatgatcatgtttgacgaggatgacgacgacgagctgtcgctgcctcgaaacgtgatgacgcacgaggaagccgagagtcgcctgtacgacgccatcaccgagaacctgatgcactgcgtcaaactggtgacgacggactcgcccctggccacgcacctgtggccgcaggagcttcaggccctgtgtgacagcccagcactgtcgctgtgcaccgatgacgtagagggtgttcgccagaagctgcgagctcggacgggctcgttgcaccactttgaactctcctaccgctttcacgacgaggaccccgagacctacatgggcttcctctgggatatcccgtcctgcgaccgctgcgtgcgccgacggcgtttcaaggtgtgcgacgtcggtcgacggcacattattcccggcgccgctaacggcatgccgcccctcaccccgccacacgcctacatgaacaactgattaaggaggggacgacgagcacggtggtcctgtttgtctatgtgcatgtttttgtatataacacagcattttatataacctttccctgtcttttttactcgtaaactgtgtactccgctggtcaataaagaaaaccacgctgttagaaaaccacgtcgacggtatttttattgatatcgacgtctcgtcctgagacagacacgtagaaaaagaggaaaaaccgcgttcagagatgccgtaggttttcggccagatcgtcccgcgggtcttcgacgtcgctgccgtagctagtgctcggcatgctgtcgggtccctggaagcgtgtgtgggccggccctcggggtgcgggtggcgggctgcgtcgccttcggtgacgtcggtggtggctgtaggctaccgagtagggcgaaaagagggtcacgctgaccatgcggcgtcgttgccggggcggctgctccaggtccgcggagctaatgccgtgcgaccccgacaaagaagaagaggagagtaagagacccgtggtagaagaagtcccggccgaggtgtacgtggacgcgggcgtggtggttcgtgtggatgacgacctggcggacggcagcgaaacagaattcggagatgctgaggacgacgacgaagacgcggacgacgaagaagctgcgtcggtcacaggacggcgaaaaacatcggcaaataaatcgcgatgttctgtgatctcgggttccgactcctggcccagaggcgctctgtcgaggagttccatgaagcgcttgggtgtcaggcccgtctgccgagaggcgccctcgatcatcatgctatagatgcgctggaggtgatacgtctcggtggtgatcttgccttcgtggaagttatagaagatctgcagggtttcgggccgttccacgaacatacgtcgacgcaggtagcggctgggttgctcgggcacgcggaaaacctcgccgttgccgtacaggttcttggagaagaaaaagagctcgccctcgcgcgccgtgggatcggcttcgagatcgagctgggcctcgcgcggctcgccgtcgttctcctgctcttcgtcctcgtccccgaactcgccgcgctcgcgggcgtccgagaccgattggatctttttcagcagcttgtacgcgctgaaatgtaaatatcccgggcagaggtacacgttggcctcgtgcagctgcgtcagtagttgcaacagattgtacagcatcggctggaaggccggactgctgtgttgccgcgcaagttccagcccacgcaccagcgtgacgaaagtctgccgtgtttcgggggcttgcgtgtaacaaaagtaaagcgcgtcgcaaagacggttgcagcgttccaccacccagtcctgcatcatttgtagctccagcgcgtgtcgcagctgtaagtgtcgcagcgtcaacaacagatacatgtcgtttagcgcgtcctccagggtgcgtgagcccgggcgtttgatggaggtgaggcagcgcaacggtcggttacgacgttgtgttacgtcggacaggttctcggcgcacagatccaccgcctcgaccgtggtgaagggcggtgggtggaacagcaggttataggtggtgaggcgcggatagcgcgcctcggcctcgggagacgcgcgcagccccagcgcgtcgcgtacccggtgcaaccggaccagcgctcgttttagcacgccgaatgtcacatcgtcggcgcccaggtgcacgctgatgtcctcgggcttgacgccggtttgcgcagcgcggcagagtcggatgagccctctaagcagccgcgtcttaagcggctccgagtacagcacgtcgagctgcgtgcgcaggtcccgcaacacatcgcggctgttgcggtagtgattagcgagaatgcagatacggataatctcctgggccacgggctttaccttcataaaagcgttgcgcacctggaagtccaccagggcctccagcgcgtatacagggctgggcacgccaaagttgagcagccccacaaagttggagcagccctgggtcaacatctcgagcagcaggcgccggtgctcgtctccaaacaggtcaacccgaaagttgagccagtcgtccacggggagaacgggcagtggcgggcccgatggggctcgcgatccctgggccatgatggggccccctttgaaaacgaaaccaaaaccagagcggaacttgagaaatcaacgctttattgttctccagtgacgttaaatacacaacggggttatgggggacgtgacgggggtaagggctgaggtgactgaaggtgagggggtcgcggcgactcgcacagaggtctggctggctagaggtccgtcttcttcgtcggcgcgatgccgcagggcggtcgctagcgtgtcgcagcgttcgccaccgttgccgtcgttgttggagacggagggttctgcccgcaggaatgctgcggttgccttgcaggagggaaacagctcctcttcttcctcctcgttttcttcgggcttttgctcgtgaggcggcacgcgtgtgcggggacgacgggcgttgcggggcttcttggaatcgtgaagcggcgccgggtcgctgtgacggagctcgtcgtcgtcctcctctccctcgtcgttgttctcatcggcctcgggcggcccggccgccgcgctgtgtgagagttccagggccgccgacaccgagtccgtatgaccgatctggaagagcatgcggtaggcctcgctgtggtaacagccgtcgaagacttgtgcgatatccaaacctgagttcatcaacaggtgtaggaagctgttctgcaggtagtggcgcaggtgtccgatgagacggatggagcgcgcccacatgtgcggcgtctggtgcaacaagccgatgaggacgtggcacagttcgcggtggcgctcgtgtggcagcaaggctaccagttgatgcacctctacgcccagcgccgatttttcgccgcagcgtttggtcaactcgtcgcgcgcgtagctcaccaccttgtcctggtgctcgcagtagtggcgcagctgggccgtgaaaaccagctggttgaagagcgcgcacacgcgcgacacagccgtctgcagttcgtcggccggcgtgggcggctcgcggagactgggctgcaggcggcagcggatactggccgtgacttgctggatctcgtgggggtccagttcggccggcgcgcgcttgagctgtgcgatgccctggtggaacttgcggtagtcgcgctcggtgcagaaaacgaagaggttgctgttgcggcgcgagcagccgccgggcggcacgggcaagtgcttcagcagcagcttcttcttgccttcggcgcgtaccgtgcccttgtacgctttggaaatcgagcctgccacgttgtcacgcatctcggcggctcgcaggactgaatcgtcgttggagaagtctcgggtggtgatgatgaagttcatgacgacgacggcggtggggcggtaatagtataggtccgtgcgagcaggccgccgccgtgggggccgcggagggaggagagggacgggaacgatcaccgctcggagaaaacaacgtcgacgggggacgtcgtttttatcgtaccgtgccgagacagaagttgcgccggacggcgttgtggcgcgcaggggctccgacgtggcgttataatgaagccggggcgccactcctacgccacgcgattggccgtcggcgtccgcagtcgggcgaaatctgtgtaccgtgatgacagatcagggggacgtgtaccgtatatgaggggaaatggcgacgggttctggtgctttctgaataaagtaacaggaaagctcataccccgctgaggttatgatgcgattgtgagagtcgatgggggatttttgtggatgtgtcgttggacgcggttttctggccgcctttccacgtaccgctgggaaaattgaaagacacgctgcgtttggcgtgctgattgcagtttttgctattggggtctaatgacgtagccactgattgtgaattgttgccagccgctagatttgtctccgctgtagctcgctgattctgctgcgatctcaggaaagcgcggcggtccagcaactgaccgcggaaacactgccgcatgcgttgcagaaagtcatgacccagcagcgcgtacaggatgggattaatgaggcagtgtaggtggggcaccacacgcgccagcgtgccaatggtgcgtcgcagtgtgaggtgttcacactgcatgggccaggcggttgtggcataactgttgaagatcatgagagagacgtagggagtctgtagcgccacgaaggagatgagtagcacgctaacaaaggttaaggtacgactcctttgtttctgtgacgtgcgctgtacggttgagtaaaagaatgcgtagaaccacgtcatcattatcacgggtgcggcaccccataccagcgtcagcagcactttccacgaaagcagcactgtgtgcacttcttcagctacgaagtacagtacacaggtggcgtgcccattagtattattggtatcgttggcatcgtgatgcatcaccaccgtggtgtaaacagctgcgggcacggaaaaaattagtccagcgagccatgtcaatagcaaaatcatataggttgaacggtatgattggcgtgcgtatgttcgtttatgaaggacgcgataacgatcggcggcgatcagagctacggtggcaaagcccactgtgcagcttgagtagtagatcaccgatagaaatttacacgaggccacgccggccggcaacagccactggttgctgagtacgataaagggtagcacagtaagcgtgagaaaattagtagagtagaggttggtcatgtaaatggtgggcgtcgaatagccaagcacgcggttcgtgagcagctgcgtgatcaacactatggcgttaagtggaccgcccacgaagatgatgaatgtgttgagtacggcttcggtggttcgaatggcgaatagcggccctgtcatgttgcaagtgtcattgatgtgcggaggagtgttgttgcgggtctgggcggaacagcacacggggcgaaaaaacagaagaaacaagtcagcggcgcttaaaagaaaaccgcgtatccgcctccgctattaaactaccccccctccctctaggtggggcgctcaccgagttgtggatgatggtgtccatcgtgggcgaatagcagaccgcgggcgcagtccggggcgacgacgcttccgggttctggagaaaagccagcatgagtttgcagtttatcggtctacagcggcgcgatgtggtggccctggtcaactttctgcgccatctcacgcaaaagcccgacgtggatctcgaggcacaccccaagatcctgaaaaaatgtggcgaaaaacgcctgcaccggcgtacggtgctgttcaacgagctcatgctttggttgggatactaccgcgagctgcgtttccacaaccccgacctttcctcggtgctcgaggagttcgaggtgcgttgcgcggccgtggcgcgtcgcggctacacttacccgttcggtgatcgtggtaaggcgcgtgaccacctggctgtgctagaccgtaccgaattcgatacggacgtgcgccacgatgctgagattgtggagcgcgcgctcgtaagcgcggtcattctggccaagatgtcggtgcgcgagacgctggtcacagccattggccagacggaacccatcgcctttgtgcacctcaaggatacggaggtgcagcgcattgaagaaaacctggagggtgtgcgccgtaacatgttctgtgtgaaaccgctcgaccttaacctggaccggcacgccaacacggcgctggtcaacgccgtcaacaagctcgtgtacacgggccgtctcatcatgaacgtgcgaaggtcttgggaggagctggagcgcaaatgtctggcgcgcattcaagagcgctgcaagctgctggtcaaggagctgcgcatgtgcctttcctttgattccaactactgtcgcaatatcctcaagcacgccgtggaaaacggcgactcggccgacacgctgctggagctgctcatcgaggactttgacatctacgtggacagcttcccgcagtcggcgcacacctttttgggcgcgcgctcgccgtcgttggagtttgatgatgacgccaatctcctctcgctcggcggcggttcagccttctcgtcggtacccaagaaacatgtccccacgcagccgctggacggctggagctggatcgccagtccctggaagggacacaaaccgttccgcttcgaggcccatggttctctggcaccggccgccgaagcccacgctgcccgttcggcggccgtcggctattacgacgaagaggaaaagcgtcgcgagcggcagaaacgggtggacgacgaggtggtgcagcgtgagaaacagcagctgaaggcttgggaggagaggcagcagaacctgcagcaacgtcagcagcaaccgccgctcccgacacgtaaaccgggcgcctcccggaggctctttggctccagtgccgatgaggacgacgacgacgatgatgatgacgagaaaaacatctttacgcccatcaagaaaccgggaactagcggcaagggcgccgctagtggtggcggtgtttccagcattttcagcggcctgttatcctcgggcagtcagaaaccgaccagcggtcccttgaacatcccgcagcaacaacagcgtcacgcggctttcagtctcgtttccccgcaggtgaccaaggccagcccgggaagggtccgtcgggacagcgcgtgggacgtgaggccgctcacggagaccagaggggatcttttctcgggcgacgaggattccgacagctcggatggctatccccccaaccgtcaagatccgcgtttcaccgacacgctggtggacatcacggataccgagacgagcgccaaaccgcccgtcaccaccgcgtacaagttcgagcaaccgacgttgacgttcggcgccggagttaacgttcctgctggcgccggcgctgccatcctcacgccgacgcctgtcaatccttccacggcccccgctccggccccgacacctaccttcgcgggtacccaaaccccggtcaacggtaactcgccctgggctccgacggcgccgttgcccggggatatgaaccccgccaactggccgcgcgaacgcgcgtgggccctcaagaatcctcacctggcttacaatcccttcaggatgcctacgacttccacggcttctcaaaacaccgtgtccaccacccctcggaggccgtcgactccacgcgccgcggtgacacaaacagcgtctcgggacgccgctgatgaggtttgggctttaagggaccaaactgcagagtcaccggtcgaagacagcgaggaggaagacgacgactcctcggacaccggctccgtcgtcagcctgggacacacaacaccgtcgtccgattacaacaacgacgtcatttcgcctcccagtcagacgcccgagcagtcgacgccgtccagaatacgtaaagctaagttatcgtctccaatgacgacgacatccacgagccagaaaccggtgctgggcaagcgagtcgcgacgccgcacgcgtccgcccgagcgcagacggtgacgtcgacgccggttcagggaaggctagagaaacaggtgtcgggcacgccgtcgacggtacccgccacgctgttgcaacctcaaccggcttcgtctaaaacgacgtcatcaaggaacgtgacttctggcgcgggaacctcttccgcttcttcggctcgacagccgtcagcctcggcgtccgttttgtcgcccacggaggatgatgtcgtgtcccctgccacatcgccgctgtccatgctttcgtcagcctctccgtccccggccaagagtgcccccccgtctccggtgaaaggccggggcagccgcgtcggtgttccttccttgaaacctactttgggcggcaaggcggtggtaggtcgaccgccctcggtccccgtgagcggtagcgcgccgggtcgcctgtccggcagcagccgggccgcctcgaccacgccgacgtatcccgcggtaaccaccgtttacccaccgtcgtctacggccaaaagcagcgtatcgaatgcgccgcctgtggcctccccctccatcctgaaaccgggggcgagcgcggctttgcaatcacgccgctcgacggggaccgccgccgtaggttcccccgtcaagagcacgacgggcatgaaaacggtggctttcgacctatcgtcgccccagaagagcggtacggggccgcaaccgggttctgccggcatggggggcgccaaaacgccgtcggacgccgtgcagaacatccttcaaaagatcgagaagattaagaacacggaggaatagttaagaaacacacacgcagacgtactttttaatgaaatcatcggatagtgacgtgtcgggaaaggaggacggacggagggtcagggatggggagatgtgagaaagttgtccgcgggcaattgcatgtcgcccagaaagaacgtggttgctccggcggcgtgcatctgccgaaacaccgtgtggtgattgtacgagtacacgttaccgtcgccctcggtgatttgatacaacgtggcgatgggggtgccctgcgggatcacgatggaacgcgtgcgcgtccacagcgtgactttgagcggctcgccgccgcgccacacgctgagccccgtgtaaaaggcgtcctcgtgtggcaagttggccaccaagaaacaccggtctgtgatctgcacgtagcgcaagtccaactccaccgtctgccgcggttgcactccgaagtggatatcgtaaggcgcgtgcaccgtgagcgaaaacacgttgggctcgttgagaagcggacagttgagcgcgtcgccgctaaaaaagagtgacgggttgcggctaaatcgcaggtcgtacccgcgctgcgcgctcgtcagcaggtagaaggaaaaggcgcgcggcatgttgcgcgccgtgatcttgtccgagacgcggtgacagaaggaggtggccacggtgcccagcagttggcgctgttccgcgtccacgcatagtgaatccacgttgacggtgaaaatgagacccatgaattcgtactgtacgtttttggacgcgatccacgcctcgtcctcgccgggtagcgccgcctcgtcgtcgtccatcgtgccgcggaactgcgcgaggtagcgcgtaatttttttgtgtccgtacgtggttacgcgtttactgatccaggtcagatggtccacgcgacacagcagcgtcgcgccatgccgcgtgacgctgacccgtccaaagggcgccgtctcctccaaccccgcaacgccgctcggagcaccgccgcagcccggctttcccggcgtcgtgaaaggcacggcgtaatgcgggcaggcgtgcggcacgaagggcaccatgaccagttgtgtgtgcagaaaaccgatctgcaccgcctgcgactgccgcatggtttcctcgtcgtaaaccgccatggacgagcagagcccgcccttggtgatgagcggttgcagcaccacggagctctcgctggtggagcagagcagaaagaagagctcggcgtacgccgccttgggcgtcaccacgttggaccagtcgtacttgtagccgcagccctgcgtgttgttgtaaatgacgggaaacgagagaaagatgcagccctgcacgtacgaagctttctccgtcacgttcgaggccgtgttgtactgctcggtgatggacaccaagtacgactcgtaggccgtcaggtgcgaggccgaacggtgaatcttggcgtggcgcacgcagcggccgtagttgtcgcggtccgcgtcgcgtagcgcttcgatccacgaggtcaccacgtcctgcgccggcagacgatagtcctgctcggggtccatgtggcggcacagccgcaggcgctctgccagttggcgagggataccgtcgtgcgaccttttgaccgcggtggtgcccgtcgtcctcgtctcccctccttcgtcctccctgttttctcttctctcattcccggtctccggacccgcagccgctacctcttgctccgcggttttctcgcccacctcgctcgtcgctgttgccgccaccgcagcggcggcgacggacggcggcggtaacagcagctccgtgaagctgacgagcggcagcggcgacgacggtggcggcgacgacacggcgacggtcaacagggtcacaagcgtgggcttgtcccccataatctggtcgccgccaccgccgtcgttgccggtccccgtttcctccggcgccgcggtttccgccgtctccggatgagcggccgcggcgcgggctcggcgtcccgccgtccgagacggtgtatataaaccgcgtcggcctcgccggcccgagcgcgccggggagaagaatctcttcccgggccctgcgttcaagacggcgtgccgtgacgctcgatgggtccgcttcatcagactgcgtacgctttggagcgtcagacccagggcgcatgtagccgacttggaggactttgccgccttttatcgcaccctctcggacagtgagcagcaggagttcgagcaagaagccgaactcgcctcccgctcacaacgcgtgcgagacctgcgcgaggcccggcgccagctcaagatggacctgatgtgttacggcggttgaaaacgcgcatgatctcgcggagccatctacgcgcctgtcagggcgatgacgacatcggcgatgacggctcctgatacgcgccgacagctgcagcacgtggagacgctgcgtcggtttctacgcggcgacagctgctttgtgcacgatctccggggcatgatggactatcacgacgggctctcgcgccgtcaacagcgtgccttttgccgcgcgggtcgcgtgttgacggacccggagcccatccagagcgagacggagggggagaataaacagtttacggagcacacacacaaagtagtctcgttttttattaaaagtgtctttgtatttccctgtcttgtgttgcccaactgctgtcaggtctccgtagatcgctcccgggtgcccgagacggggggcagatggctataaaaacccaagtagcggcgcgccccggcgctcagtcgcggctgagcgtgtggaggacggggtggagcgggtcgccgagactactactgcttctgcttttttgtctcctgtggatcgtcgcggactgccggcatgtccggccgtcgcaagggctgctcggcggccacggcgtcttcctcctcgtcgtcgccgccgtcgcgccttcctcctctgcctgggcacgcgcgtcggccgcgtcgcaaacgctgcttggtacccgaggtcttttgcacgcgcgacttggccgatctgtgcgtgcgacgcgactatgagggcctgcggcgttatttgcggcgcttcgagggctcgtgcgtgtcgctgggctggccctcgcagtgcatctacgtggtcgggggcgagcattcgccgcactcgctgaccgagatcgatctggagcactgccagaacgactttttcggcgaattccgagctctgcatctcattggcacggtctcgcacgccacctgccggtaccaggtgttcgtggacgcgtacggcgccgtgttcgcctacgacgcgcaagaggactgcctgtacgagttggcctcggatctggccggattttttgccaagggcatgattcgctgcgacccggtgcacgaatccatctgcgcgcgtctgcaacccaacgtgcccttggtgcatcccgaccatcgggccgagctgtgccgccgctcgcgcgcctccgctcgcggccgctatctacgttcgctgctggctttccgcgagttgctggcctgcgaggacaccgccgctcgctgtgcctacgtagaggcgcaccgcgaggcgcagctgaccctcatctggcctgagaagcattccctggtgctgcgcacggcgcgcgatctggggctctcggcctcgatgctgcgccgctttcaacgttcgttgtacacgcgcgagcccgtcatgccgctgggcgagatcgagggcgctgaggacaagaccttctttcaccgcgtgcggattctctgcggcgacacgggcaccgtgtacgcggcgctggtggggcaggataagttggtgcggctggcgcgcgacctcaggggcttcgtgcgcgtggggctggcgctgctcatcgacgactttcgctacgagagcatcggccccgtggaccgcagctcgctgtacgaggccaatcccgagctgagactgccgttcaaaaagcgtaggtgagtcatcagtgtacacacgtccagaaatagggcgacggtgtttttataaccgaaagtagcgtgtttgagacacgcgcttatagtcggttttttcaccgtcgtcgctctaggtttgattttcgcgctcttgtgtctcccgacaggctcgtcgtgggctactttgactcgctatcgtcgctctatctgcgcgggcagcccaagttcagcagcatctggcgcggtctgcgtgatgcctggacccacaagcgcccgaagccgcgcgagcgtgcgagcggggttcacctgcagcgctacgtacgcgccacggcgggtcgttggctcccgctgtgctggccgccgctgcacggcatcatgctgggcgacactcagtactttggggtggtgcgcgatcacaagacctaccggcgcttctcgtgcctgcgccaggctggccgcttgtactttatcggcctcgtcagtgtgtacgaatgcgtgccggacgcaaacacggcgcccgagatctgggtctccgggcacgggcacgcctttgcgtacctgcccggcgaggacaaggtgtacgtgctggggctctcgtttggcgagttttttgagaacggtctctttgccgtgtacagcttctttgagcgcgactacgtggatgaaatcgtagagggcgcatggtttaagcacacctttgcgggcatgtacgaactctcccagatactgcacgaccgcaccaatctgctgcgcgtatgtcagctccacgccggtagcaagatccgcctgggcggctcgcccgcttgtactttcactttcggctcgtggaacgtggccgaggccgacgaggccaacaattttgtgatcggcgtgctagaacaggcccactttgtagtcatcggatggatggagcccgtgaacaaagccgtatttatggacgcgcacggcggcattcacgtactgctgtacggtacgatgctggttaagttggccgagacgctgcgcggttttatccgtcagggctccttctggtttcgttgcccacggcgtttttgcttctcgccgttggactcgagcgcaaccgtcgccgcgaaaccggtgagcagccatacatcgcccgcgtacgacgtcagcgagtacgtgttttcgggccgtagcgtgctggatagcgtgagcggcacgggggcgtcgtgaaggaggagactgtgatgactagctatatagccgctgtctggctttaccgccgtcgctccgcgtcgcttcgccgccaccttcttcttcctctcagtcatgaaccccgtggatcagccgccgcctccactgccaacccagcagccggaggagcaggctaaagaagaccatgacgacggtgacgagcgcctatttcgcgatccgctcaccacgtacgagtatctcgacgactgtcgtgatgatgaggagttttgtcaccagttcctgcgcgcctacctgacgccgattcgtaatcgacaggaggctgtgcgcgccggcctgttgtgtcgcacgcccgaggatctggcggccgccggcggtcaaaaaaagaaaacgccggcgcccaaacatcccaagcacgccatggtgtacattcgccgcagctgtctggtccattcagcctgcgctacggcgcacggcaagtacgacatccgcggtctgacgctcgagtcggacctcgctgtctgggccgcgcttcgaggcgtgcccttgccgcccgatccgcagcattttcgctggctcaacgccggcgctttccgccgtctggtgcacgaggcgcagtacttgccagagatcagtcgcgccgccaaacgcatcgctctggccgtggccacggggcaatacgtggtgtgcacgttgctcgattacaagacctttgggacgcgcacccattacttgcggcagctatgctcgatgaccgaggagctgtacctgcgcctggacggcactctgtgcctgtttctggagcccgaggagcgcgaactcatcggccgctgcctgccggcggccctgtgccgcgggttgcccgtcaagtaccggacgcaccgcgccgccgtttttttccacgccacgtttatggcgcgagccgaagcggcgttgaaggacctctacgcggccttttgcgagtgcggcgacgggcgcgacaacggcggtaatcacgacggtaaccacggcggcaatgaccactcctctttgtcgccctccgcggtggcgtcccaccattcccgtttggaacacgccgagctgaggctggagcgcaacagacacctgggcgcgtttcacctgccagcgatccgccacctcacggccggcgacgtggcccgcgtccagaacagcgtatcacgtgacctgggcttcgccgactggtcgcaaacgctggtcgacgactactttctgctccccgcgggctgggcctgtgccaacccgcgtcgcggctacgccatgtacctggcctccaacgccgtgctggccctgcgtatcattcggctgctgcgcgccagtatacgtcacgagtacacggcgtgtatacgtatgttgagcggggacgtgcagcggctcatcaggctgtttaaaggcgaggctgcgctgctgcgcaagggactcgctcagaaccccgtgcaacgtcgagaactgtcgcggtttcgcaaacacgtccacgatctgaagcgcattcgcttcaccgaggacacgttcgtggagaccttctgcgactttctcgagctggtgcagcggattcccgactaccgcagcgtgtcgctgcgcatcaagcgcgagctgctgtgcctgcacgttttcaagctgcgccggggctgtcgcgcgccgccgacgcccgagacggcgcgcgtccagcgtctgctttggcactcgctgcgacacggggacgcgccgcaggatcgcacgcggctgccgcagttcagctcggcgctctcggacgccgagctgagcaaccacgccaaccgttgccgccgcaaggccccgctggaactcggacccgccgtcgtcgctgccccggggccctcggtgcgctaccgggcccacattcaaaagtttgagcgtcttcatgtacgccgttttcggcctcacgaggtcggaggtcacgccacatgaagccgcggcggcgcgttataagcaccgtggggtcatcgaccgacgaggcgcggcgatgacgagcaggcgcgcacccgacggcggtttgaatttagacgattttatgcgccgccagcgcggtcgccatctggatctgccctatccgcgcggctacacgctgtttgtctgcgacgtggaggagaccatcctcaccccgcgcgacgtagaatactggaagctgctggtggtgacccagggtcagttgcgcgtcatcggcaccatcggactcgccaaccttttcagttgggaccgcagcgtggccggcgtggcggctgacggcagcgtgctgtgctacgagatcagccgtgagaactttgtggtgcgcgccgccgactcgctccagcagctgctggagcgcggcctgctacacagctactttgaagacgtggagcgcgctgcgcagggcagactgcgtcacggcaaccgctcgggcctgcgacgcgacgccgacggccaagtcatccgcgagtcggcctgctacgtgagccgcgcgctgctacgtcaccgtgtgacgccgggcaagcaagaaatcaccgacgcgatgttcgaagccggcaacgtgccatcagcgctgttgccgtaacaaaacaggaaggaaaaaaacacacacatgaaaaacccggagaagacagagaggacgagcgtccacacaccgctttggtcgtagacgtactttttattcttggtacattaaaaaacaaacatatactttcttgtgactttttaccataaactgttccgccctgctgcttcgtcccaccatcagcaacagtactccccgctgtcgcggcggtcgcgacggtgacggtcccgctcgtcgcgttgaggatagtcgcgcggcggcagcgggggtggtggggatcggcagatttgttcggggtgattaccgttcgcttccataaacgctttaagagccatctcgcgtaacgtgtcttcttcgcgttcgtcgggggggacctggctaaagattttgagcagggtgacggaggagacacccgtgtgttcgaccggaatgtgtcgactcgagggctgcgcttgcaaccgcgccacgcatatgtcgcgggtgatgagtttctggcgcaggtgggtggcgcgcgggtcgcgcaacagcggatcgcgcaccataaactcgcctacgaggcgttgggagctattgctgccgccggtgtcaccgataataggtctgtcgggacaggccagcaggcgcagggcgcagtacacgtagtcggtgcaaatgaaggcgtcctgctgacgcacgacgcgtaaaaagtcaaacaacgccggcgtgctcgcgtagagcgcgtagtcgtagttttgactaacggcccagtagagcacgtcactaagctgcgcgtagtcttcgcgcagcgacggcagttgtacatagatgaggtaacacagctccgagatgctctgcagctggtgctggagatagcagcgcagtacgcgaatggtgcgttgaaagtgcgtgatcataagctcgacgcctactaggaacgccagatcgttgagcgtgtgctcttcgcatatctcttcgaccgaaagcagccggagcatgccccggtggttctcgttgagccgctgcaggttttgccgatagaggtagagcgcgccgcgcgaggtgtagtgggcggtatagaagagcacgttgtaatcgcgtagcgtctggtagacctcggtgagccgcggcgattcgggcgtgccgcgatgccgcagctcttcgtccagccgccgcagagacgtggcgtactggccgtccgtcactccttttcgtgacgtgagaaagtgaagcgctagcgcggccgcacgccccgaacggctctggttgttgacctgcgcggctacccggcgtaccgtgtcgccccgcacggtggtccgtatggcctccaccatgtggcgcgctttcttttgcgccacgtagtaatagttgatgatcaccgcgtgcgtgattatccgacgcgtgagatcgcgctcgccaggcgctacgttgtttaagacggggtcgacgaggctggtgagcgcaaaggccggcatgggtatgcattcgttgaggcggcggaggtgctgcacgtcaaagtcttgcagcacgaatttgagatactcgacgtgctgcggcgcgaccacgctgggctcgaagcccagattgtcggccacgctgacccggtaacattcgcgctcaaagtcttcgatgtcgctgtcgcagaaggaaaactcatcgccctcggcagcggacggctcacctggcgccacgggactggtgcttctgctactgttactggtggtgcgactgctgctaccgccgctgctgctgttatcgtcgccaccgccgccggcaccgttctcgggcagcgagggcacactaggcggtcgcgagactttaggcgacttgccggccttgggtgtcgccggcgagccccgaggcgcgcccgctgcgatctgcggttgccgacgcgacgacgatcgtttcttttcgctcggtttcttggcggcgccggtgccgccggtctcgcgcacgagctcgaaggacgacggagcgtccgaggagacgctgtagggcgacaaaccggcctccatgcgatccagatcttccgtggcgctgcgcgcccgcgtgctcgtgaaaacgctgtcctccgcctcctcatccgccggtgtgtcctcgttgctcgaggggatataaatcaccgtcgagggttcgccagagcgacgtgacgagctgcgacgccgcgacgacatcctctcgtctgctgaggtgcgttcggctcagttgcttacctgcatacatggaggagacccgggcgggacgttatatagtgagggccggctccggcgggcaaaccgaagatacagcctcgggcgcggaaagtgtcctcgccacgctggccgcggtgaggacaagaagacggagcgtggtgtgcgacgggcccccgggctcgcccactgactcggcgcgtcacatgagcgatctggctagcctggcgctcacggccgagttcggcctgggctgtctggaagcttacgtgcgcatcaacgcaggccaggtgttgcccgtggtctggccgccgggctggaacctagtgctgcaggagatcgagacggacgaggacttcaaaccggaggacgtgaaggcttggagtcactacctgtgttgccagacgcgcctggccttcgtgggtcgcttcgtgaacgagggcgtgttgtcgccggatcagcagaagaagaccgctgtgtgcctcatctcggacgagggctatgttttttgctatgtacgcgaggacaccgccgtctactacctggcccgcaacctcatggagtttgcgcgcgtcgggctgcgcgccgtcgagaccctgcactgcatgcgctacctgacctcgtcgttggttaagcgctactttcgcccgctgttgcgcgcctggagcctcggtttggataccatggcgcgatttatcatccgccaccacgggcagttcatgccgttgacgtacccgccgggaacggaactgcgtctatgcaacctcaggtgtttcgaaaacagcgtggaaggcggtcacttgctgcgcaacatcaaaaccgctttcggaatgcgcgttctcggcctgggaaccgtcagcctcaagggcgagaacgcgccctttcctcacttgcgctggcccgtcgaccttatccccatcgtcatcgcctataccggggccgtctacgcctgcgacgtgcgcgacgaccgctacatccgggtgggagataatctcaacacgttcatgtgtctgggacttaacctgctgtttgaaaaccgacgtttcagcggccacaacggcatctacgatcgcgtgcccgactgccccaaaggacgtcagcaccgttgactgtgacgccacgagtgacgacgacgctgcttggggcataaaacaccgacgctacttcccgtttgactcgcgtgccaattttttcgctgccaacgccgtcaaggccgcctcttctggccctccgccacccttcgctcgagcacggcggtgttttgccgtcgtttttttttccggatcggcccgatttctttttgtccactgacgcgcgaccgcgatgtcggtaatcaaggactgttttctcaatctgctcgaccgctggaggcctcctaagacgtcgcgaccgtggaaacccgggcaacgcgtggccctggtctggcccaaagaccgctgcctcgttatccggcgtcgttggcgcttggtgcgcgacgaaggacgggatgcacagcgtctggccagctacctctgctgccccgagccgctgcgtttcgtcggcagcatctgcacctacaactttcttaaacacaagggcgatcacaacgtgccgtctgaactgtacctgggcgcctcgggcgccatgtacctgtggaccgaccacatctactctgactcgttgacctttgtggccgagagcatcactgaatttctcaacatcggtttgcgacgctgcaacttcatcaccgtcccagaggagctgccgcacaccgcctcgcttagagcgctggccggctgcatgcacatccacgcgttcgcgcagtggcgtgctacgtatcgcggccgactcatggtcatgggtgattacagcgtcattcgcgtctccacgattcggctgtacgactggagcgagattaacgactggagggtcatggtcggcagtaaccacgtggaacctttaggctggttggtgagcccctacgacgtgatcaacctcttcgtggacgactgtatgcgcgtctttgctgccaacaatcagcacgtttgcatcgtggccgacagtttgatggagtttgtgactcgcggcatgacacgctgccacgaaaacggcatttattacggaaccaggagcatgcggaagctaaataagcctacctgtccttacggagtggaccaccaactttttgacgacgcgtgaacccgcgtctcccacggaccgtgtgccttttttttccccgttcctgtaaataaaaagctgttttttatttttcatacgaaccgctcgagtcgcgtgtgttttgacggggctgggtggagagggaaggtcgcgccgccgcagcatcccgcatagcctctacaaactagcattctggtgagatacatgttcataaactctcacgggaaggctagttagacaggctatgggaagaaaccgtgtttcgcgtgccgaatacaaaagaaaaaagaccggaggcggggtgtttttagagcaaaaccttacagctttttaataaaaaacaaggtagtcaacataatcgttaacccttggggtctgctgttactgaatcttcttttcattttctttggcttgattttctttgtgttcatcagtcttttgtggttgctgatgttcgctgccatctccgtctgtaatcaaaacgtcatactccccggagtaatcttcgtctccgtcggtggtggaccccccctgactgagagttacgttcttgctgggggtggtattactaccatcagcgctggtactgggttgttccaccgtcacgctgcaaaaacacgataaccgcgttcacaatcacgttattttttgtatttcttacctgtgttgaattccccagattccgtttacctgcgcttcgatttctgagaaggtgccgccaaagccaccgtcaaggtcacggctagtaagctcaagatccatagcctccgagccatgctgaggtcttgtcggcgtcgctgctgacgaacgcgtctggctgtgtgccgttaaataccttgggtgacgacatctcgaggtcatgtggccgcttctgaaaaacaacgtagtccggacgggtcgcagatacgcggtttttcaacctcgacggtttacgcctcgcccccaacatgacgcgttcgggacgaaagacgacgtcaggggattcacggtatttagccatgcagcgtgcggcgcctctctcatggatccactgtcaccgtcgcgatgggaggtagccctgttccccagctcaccaccgtcactcaaggactcatgccatctgtgcgcatggactttcgggctcgccggcccttgcgccgcttggctttctacgcgccgcgagctcgtcggaggcttttccagaatcatatacatccagaacagcgccgagtgctggtcggtgagggagacgaagagatgttgccggatctgccgatggagatcgacatcgtcatcgaccgacctccgcagcaacccctacccaatccgctggtgctattgctggacgatgttcccccccatgtacccggttttgctccctaccgcgtcccccgtccccaccccatgattcccgaagaacattgggaccagttttaaataaaaacattttatttacatctgtacagggatcatataaaagtctatatatccagtctattgtcagtatttgtgtgctcaagttcagtgtagacttgtggaaaatatatagtccgtaccgcttggggctcagtccaaagtccgtcatgatggtatgcagattaccatgtgcgtgggctcaggcgacgacggaggagacggtgggaattctattaagtgaggaggtcgtggaggaagtggaggtggtaatgtccacattttgctttcccggatccaagggacgagcagtcgccgcgtgcggataggcacctggacttcaatgtccttgtgcgttaacaagttttctttttcctcctcttcctcagtgaattctggcaagcgttcaaagccgcgtgggcatatcagaagtcggccacagcgatagtaacagatgaggataagcagcgataaggaggcgagtatgatggatattatacttgtgattcctatgcaggacacggagaacaagtacgcgtttctgcgagtcatgtcgaatatataagcttcctgaagtccgcatgtaagcaccgccacggaattcaggatagcataactcatgaattcctttggtatgtcaccttcagatttgttgtaccattccaccgtgacgttgagggtatactgtttagcgggcagcgtgcagcgtgtttcattttttaacaactcgattctggtggtgttatgagaagtatcattaccgacccactttttccatagttcgcacatgcccaaaagatatcccgagactgtacttccacaggtgttatttgtatagttgtaagcatttccagagtaccaataagtatcgttttgagtacagttcaaaagccagagggtagtcaggtaagactcaccgcggttgatgcagttttttgtcaggttagctacgctccaattatctccactggacgcattagctgatatgttgccttggatgaaattgaatgtcccggttaggtcggtgtagtttgaatacaaacctccaacggctgtgcgggtgactccgttgggcccggtaaggagagatacaaagatggtatctgtattattatttcgggcgtcattgttcgttgtcacctgtgcccagtggtaattcagcatcaccagcatagcatgtatcccgagcatcttgccggacactgaacataacggcgtttgtatatataaagaccgttccaacgcaacattgaggtgtcattgacgtctttattgacgtggttttaccgcaacttcctcttttcgcaggttgaatgaggaacccgcgtagatccccaacgccggtttcatcataaaccaccgtgagaaccggcgcgggtttcaacacgaaaccgcgtcactcacggacgtaggttatttcgaaaacctacgttaatcctgaacgcgttttgtgtcacgcgtccccgcgactcacatctagctcgtcttctgacgctacccacgaatttcgtaaccgaatccgcttcagcgtttccattaaactggcgcaatccacttctgactgactcggtcgctcgatgcgcacggacccgtgatctaacacgaacatagtgtagtgggaattcgtggcgatggacgtcaaccgaccgcagaacccatcacgagtgcgtcgcgtgagaaacatgaccgtgttgacgggggcacgcggtaaccgacgtcgaaacagctcatacagggcgttgctggtcatgacgaccggaccttgcgatagcgccacgcaaaggccaggttacgtaggtattgtttcaaggtggtaaagtagtgcaggaacgcgaatagcaaagcgcataaaagcagggctaggaggacactgctgatggtcatggtgttatagcgtttgttagctgtcgggtgatcggggacctcccccgaggaactgtcgtcaggtgaggtaacgctgatggggatttccaccgtccaattaccgtgtgtaacgcggcaggtgtagttttgattgcaaaagatggctacgtaacatccctgatggaaagtcccatccaaggtgggaagtagcggattgcattgaggctcgctatcctcgggcaccttatcaccgtaatgaataaaagtaatattaatttcccctggaaagaacccgtaagatgtacagaatgcttcagctctgttgtcattctggtttcggacaccgccctttaccactgggtgggtgacgggggtttgaaacccgctataaatgacggaccattgagtgcaattacccttgagatagttcctttgtattgtagtatccccctcgctgatgtttttaattttaccgtcgatgtacgttttgttttgcttcaaccaactaatttcgtaattggggcccgtccatagtgtcaggttatccttgagctccattaaagtttccccgtcccacccaaatccctcgtaaccggctacaaaactaccgttttccgtggtattacactcgtgcgtccacgtcagcacgctctgtgaccggtaacccaacgcaatttccagctctaacaggttttgctcggtttggttaaaaataaggtcacctttggctctttccccgtctaggtaggtggggtaggccgccgagacgttggccatccaagaaatggtaccgttggcccgacttgacgttctatcgctggaattaacgtgataggtaaaaaagtgttgcccgtcaaaaatccccacgacggtcaacgtcatatgcgatgtatcatcaaaaatccccgtgtacccgtaacgcaacacgtgcattcccaccactctcaacatccatagcacaaacaacgtcagacaccacgttgtcatcatggcgttttattaacagttcctcggacatgatcggcgttatatactttcagtccgcgttttgacccctcctatcttctttgatgatgtatcctcttagccgtgtgttgtttactcctcctcttcgggagaccgtgccggatccgacatcagtggctccgagtcctcccgaggaaagaaaagtcgtcgaaacagccagcacaaatcgtgccaaaatagaaggacggccgccttttttcttcttttgggaatctcggcgggcctctgggggccgcacggagcgcggcgtcgaggtagatgtctgcggcgcctgtggtaaaccgtggtgtcccaggatctcttagacacctgttcgtccagaatcaacatttccaaccgacagtgacggggccggccgacgaagtgtgtgaagagcgcgtgatccatgctcgtggcaacggcgtgccgcgctcgtgtcaaagagacccgtccacgggggacatggccttcttatagcagcgtgaacgttgcacgtggcctttgcggttatccgttcagtcctcggtgcgtaaccgctggtatcgatgcggcaggcgaatgcgcagccgctgacacaatcgctgggggatccgtagggccaacaagaagaagaacagagtgatggccgagaccaacacgatgtctctcgccaaggtcgcggacagttcctcgtcggcgcttacggaggggtgtttggcgagcccggatccgggcggtctcggatatagtgagcccaatcggacgtagaggcgctcgattattttcatcgtaccgttctcgcagcgtaaacagtcatagcggcccacggtaagattagtgaccatgcggctggtgtacagtttagtcacagggacggttcgcattttcagtccgtcttgcaagatgttagtggtgatgtcgctgaaattgcggatcaccgtgtcgttctggtacaaccacaggtcaaccacagactcgttatgctgccaagtaaaagccacgccgatgatctcgtcttcggtcacattctcgtagtagcagatagaaatacacatcccgtgtaacgtccacgtttccccaggatggatcgaggccaactcagtcacattcaagcggcaggtcgagttggaggacttgctacccaggtcaacagcacacggggaagaggcagataagcaaagaacaaaaaacacccatcccagcggtaccgtacctcggcgacgctccatgccggcgcctgacggtcctttgtgcgcgctccccataagtacccaggcttttgaccccagtcggtacctacgtcagcatggagccccgtgtccgaggaagaaggaggagaggacaacgaggtccccggtaagattaagggtaaacatccgaaaccggtttatccccgccaatattcccaataaaatacaaaacacgcgttccttgacatcgattcaaaatttattgtgcgcgataccgcatcgccaaccacgaacacagtccaaaaaccagaaacatgaaccacagcccaatgtccgccttctggtgatcggtccgcgtacaggcggacgtttcattcgccgaaccgcgtctggtaccgctactgtgggcgatgggaccgacgtcggagtcgcggcgttcgttggcgccgctgccgcgtcgggtaccgctgccgcagatgagcgcaccgacggcagagccgcgtcgctcgccggcgcccgtcatctgacattccgttttcctgccgtgactgcgaatcatccgcttcatggctctcctcgtttactcccgctgctgctcttcctcagagacggccgccgccgctaccgcagaggcttctcccgcggcagtttcctctgccgcctcgttttcctcttcggtgttcagacgccggtacgattcggaacaccagtagcacagcaggtggcagagggaggtcagggccaccgatcccgcggccagcagcccgatcttcggatccgtcagccagtaatccctccgcagatgatagcgccgcctagcgccgtctacccgatgccggtggctgcagttgttgtccgcgatgctctggctgatgaagggcacgcacagttcgcgctcgtcctcctcgcacgagggcagcagacccgaggtgccggggatgtagtggaccacgcggtgccgttcaccctcccaaccacagtttatactgcgcaacctggagggatcgggcgtccacaggtaccgcgtctgtgagcgagatccgaaagctaggtcgcaggagcggtccgagtggcgcaggtcgtgcacgtcggccaccagcgccgtggtctcggtcgccaggctgtgggtctcgttgcccagcacgcaggtgtaggtgcccgcggtctcggtgataagccgaaacgagaggctcagccgctgcgccgcgccgccgtcctcgaagcgccagcgcccgccggcgatgtaacagctggcgtcgttgtgtaacacctgaccgctgcgtgcgtccaccaccagcgaacgcacgatctcgggccagtagcagaggtggactcggatagagacctctggccagtcgtgcgcggggaagatgcaggccacctccagacggtcgccgtaaggcagcaactgcggtgagcccgggttccgctcgcggttgcggtcgcgcaccggctgcagacagggcgaacgcaccaccggaggcgcatcgaggcagcagttgccccactcgctccaggcgatcagcagcggcagccacagcggcggcagccggccaccgcccatacctgtctgtgtttcagagctccttaaaaagaccacacgcgaccacatattatatataaggtgcgattggcagattatctttattggtagtgtttgacacgcataagcgaccggggatggggggaaataaaggaatggctcggtgtattctaaatcgtcatgggccgtcgaaccaggtagctcgagacccacagtcctaagcatagacgaaacagggcacgatgcgggggttctcggggcggacaggccacggtcagcgtatttgtcgtcattggcggcgattcacacggtccaccttcctcgttctcctcctgtgacctcctattcagttctccttgtcccgctggataagtgacctgcggctcttgaacctcatgatcatcatcatatcttcccgcattattccttctctcgtcgtttccacttgctcggctcccatcattcccttctctcgcgccctctctcgaaacgtcctccacttcttcacgttgagtgtgcgttgaatttcttgtctcctctcccgtaagctgttgacgtggttcctcgttctgccggagcaccgtgggtgccggcggtatgacggccagttcttgcgcttcggccgccgggttctgtcccggaacccacgtgcgacgccacaacgtggttctttgcacaaaccacgtacgtactcgcgtggccgtctggctcacgacgttgctttcctcccagcgggttctgatctggctagagacttgctgtgtccaaccgtggcaccgtaggcggaacagctgccagcggaccgtcagttgttggcgtagttgacggagtcccgcaccgccgggtcgcggtccgccggtgttgggaccgcttcccgcgggatgtctcagacgcccgcgtccgaaacaccgttggttggagaagcgtattcgcgtcaggagcagcgagtccctgctgcggaccgtcagagcgttatagcgccgtctttcgtgccgtcgccgcactgcgttgtcactcgcgccgtggctgacggtgctttctgcactgtgtggtgattcggcacgttctgcgtccgcgtctcgtgcatcctctgccggctgcgatggtggatccggaggggggaacgagggtctcggaatcgcattacgcgactgatttcgccgccgttgttcttccaccagatactgcagctcttggtactgccaacgtatcccgtttcgcgacggcagttcgggtgatacggcgtgatgctgtgatgacggcggtctcaacggccgcggggaacgcacatcgtagacgggcaaatgcgggagcgatcccgaccaaagcggcggtcggtccaggtcaacggcgtttcgccgtgtcatgaccgacgccgctctgacttggaatccggcgtgctgcatagcttggcgcactatggacagctggtacgtcgctccttgtatttcccgtagccactcgtcctcctcgacaatgtccaagccgtgggcccactgcggccgctgaaaaaagagtaagaatggcagtctacacagtagcagcgggagcagatgataacgcaagaagcgaccgcagtgggcccacagcatgctcttggtctttctagggccggtcaacagctttatgaagggaatcagggacgtcggctttggaaagcccccttggatcctttcggtatcgagagcgcgcctggcttcaaatacgtcaaaggcctgtccgccgcgccagctggcacggagttggcgtttcacagtgatttcatgcaatcatttcctacgcgacttgcttacagatcggtttgggggatgagcacgatgccgtgcttgtcatgctgccagagcagccacagcttttgcggtattcgaaagtagaaaatgataatgatgataataacgattacgaccgctaaaacccagagggcgtgtgtagccacgtgttggtgctgtgggcttggttgtaacggtgtttccgctgctgtggcttcaaaaccaacgtgatgttctacgtgactgttaggggtggtggattttttgggactggagtgtttatgatgggtagtgcttatcgtcgtcttcttggcggtggtggttgttctcgtggtggttgttttttgtgttgtggtagttgtcgttctcgtagtcgtagtgggctttttggtggtggtagtggggaatgtaccgttttcgttcactgtcagattgtaacatgtgtctaaagtccatcgaaaaccatggttatgttgttggtgacgccaatcgtctagcgatgtcatagtacgataggtagtactatactgcgcggtaacgttaatgaggaggaggctgtaattactcagacatgaaaaattaaagcgcgtgctgttaaacgttgttgttgatgtgccagtgaaaatgcataacatgtagccttgcccgcctggaccgtatgaccaacgaacttgatcgcgaggggggagaacatctaccgcgttcaacgtaacgttggtacctatcttgccaaccaccggtatgcaggcatcatggaggctgatgtagacaccaaagatgcatgcagccgttaggtaaagtaccttttcgcgatgaaaggtaatgtacctgagcagcattctaccacaggtgatttccacatgttctcaggttccgtagggactgtccctatattcaaacagtgagtttgaaaccggacatatccgtccgctcacgataattagtccgtagtgggcaggccatcggtccctttgtaaaggtatcccttggtgtcccatttctctcggagtctttgaggaatcttgaagaaaaacagaatgacgactatgataatgatgatgacaatgagaatccatgcgctgtgtgcggcatctttggctctatgtgcctctacgttaccggtaaacgagtccgcaaagcctttcggcagacccgttacattgtaatctttaggtgacgttcctcgcgtggatcttttgtgctgcgtatgtttatttggcgtggtttttaatcgcgacaacgtagttttttgtccgggtcttctggtggttgtcgttctagaaatcagcgataatgtaaaacatgtgggaaactcacagttaccctttggtggacattttcgcctgcaatagtttctgggatctgagacgtttacatgaagaatgcttaatgtggaattgtgacattcatacaacagtggtgatggcaacggagtggttttcattgtcttttgtctaccaggtttaggagggtcgtaggtgcagataggatgcgtattttcgccgttgctgatgccgacgcatgactggttataccagtgtactttttgtcctggatgataaccatgtccactaccgagggtaactggatcacctactctgacagtgacctccatacaggtttcggaatacctgtaaaatatcattgcggtcacgacagaccatcggaaaagatcatggttcacgatatggttaatcagtctccgcataacacaaacacctgttgtataaccacgtatatgtacgtcattatgtttacggtattcaaacagtgagctgaaaaataaacgtacatagcttttagtttcctcgacggtgattctttaagtggcggcgagcatactgttgtatcggtattgtgtgaatttattccaagctttctggggaaatttgaaacaaattaaaacgataattgttataacgataactaggggtatgatccacattgtatgtggggtggcagtatcgtgttgtgcttcaacgttaccggcggtataatggaccgcgacatgtgtgaagttggttgaagttaatgtgtatgacctgtgtacgggtgtgggtgaatacatggataacgtggttgtacaacagtgtgtttggtaggcagaatgtacactgacattgtaacacagggtattgtattttgctattgttactccaagggtttcaaaagaattaaaatagtaatttctactatatgtagttgttaaattaataagaataagtgtatgattctgtacacattgccacttaatgttcggagcgttctcattgggttgtacactgcactcgttattttgataaatacatagtgcgttagtaactctcggtttgtctatataccattgaaaagcatcgtctttgactgacaatttgttaacgggagataagctgatattctggccactgtagccaactatagaagtacatggcgttgatatgtagttccaataattggattttcgtgtacaaagaatgattgttatccatcgaagtaataacgcgtaccggaacatcatagttctgtgtccgtcatgaacacttgtccatactgtttactgtctttccagcgatcgtaaacttttcgaggtgctcgcagacagatgataataaaaataatgagaatgatgacaataattagcatccaagaataatgtgttgtcgttctctgatattgtatttccccaaccgggtgttccacacgttgtgggataatcgtagtcgcgttgtcaaagtttaccgcagtctccgtgcttcccaacaacgacgcactggctcctaacgttgtccggtcactgttatttgtacgcgttgtattggcggtcttcgtgagtccataatttccgttgtaattttccgacgtagatagtcccgggctagtcattgtgggcacaaaaccttctccctgataaaaagcacattactataattctgatttactacacaacaatttccaccaccccataatacaaacaactatcagaatcaaaaacacgacaacacctaccaaggccaggtgtgtgttgttttccgagggcgtttgattggagaatccagcaacagcacgtagttgtggtgttaaaatggcatttctagtcccgttactctccgcgccagtcactgtcggcgtcgttgtaacgatggttgttacgttattagctgaggtagttttcagagatttcagtgtcacggttaagttgtaccacaggaacgtttcattttcgccgcttttcatgaaaccttctgctccgtaacgacccgagttgttcaacgtcaggttgaagatggtgatctggctagccgcacaacttagacttaaacccacataaggcgttgaaaatccttctttggtcttgtagaaacagatgagatcactgtggttgccgtcccagcgaaaccaccgtacgctgatgtttgaagtgaagttagataccagggtaacgttccctccctctggcgcatacacgtagatgacggattccaaaatcacgggggcaaacaacgccaaaatcaatagtttattgtacacatgatgcactgtccaacggaatcgtggaaccgtcataagatgagaacccacgccggaaaccatgatttatttaccacggtacgatttggaaacagtcacgctcaaacagtactttttatttcctacgttaacagaccacgttcttcatcgtccacgtggattcgccagcgccgccaagccgattgaggcaaacccaaatcaatgagcaccatcacggcggcgaacagcagcatcgcaacgccccagctgccataggtgaatgccaagttagttatgttcttggatgacgtcctgttttcgacacgctgttgccgttgataactaacgtgtttaaacgcgctggaatttaccgctagagtcgacgtaatgggtgacacattcgccgtggcgtttgtaactaccgtgggtgtcactacggtggttgtgctctgagccgccttgggatgcaccgtcaagttgaaacaagatagtgttatatgtttgtcggtacagttgtcaccttttcgataataagtgccactatgattttgagaaaggttgtacataaaaaacgttgtccaagaacagccgaacgctacacgatgtcctaatgagacttgggtatatggtccccacagggtacaccatggccccagcgtacttccattctggtaacgtccccattgggttatgttacaacctgatgacgccgagccgcataactcaacgttttgtcccactgttgtagataccgcgctacagttaggcagcctatgagaaaccacgacccaattcgttgagccttcagaggcacaaaccatcaaaatcagaaccagcgcgtatctggaaacccagactttattaaaaaggcagctcggcatgccccggggcgtgcgggcaaaagctaacatgttgagtgctacatatgtgcgtgagcgcgtattcaaacagtgagttatcaagcacaccccagcccacccgttcatcttagcgtgcactacccgcaaaagtccctcccaccccgtttcagactctctgactgaaaacaaatatgcaaaagcaaaacacaacaaactatacacagctggctaactagctacacggtagcgacgagacgttgatagcggtatttcagaggacgggcgatgtcccggagacggtctatgcagaaacgacagatggattgtggtacgcgaaacaggctggcgaaaagcgtcaaaagtcctagcaagacgaagccggtgacccaggtggtgtggaaaatcaggcctccgtagaactgcttagtgatgatgagacgactccacggaacgagttcttcctcccgcgacaacagcatcgatcggtcaggaggaggcgcgatcgccagggatggtgtacgagtgctcacgctggaggtgaatgctgcttcgtcccttgatatagccttgttactctccgcctcggtgatgtcgtaacagcaggactcgaacgtggcacaatcatggagacgcaaaccgatcaaccacacaaaagacaacacgagctttaagcgtgatctagatacacgatacgcagcaaggccgggatctacacagtcagagtagcctagaaacatgttagcgccgtagggacgcttaacatttcaaaagcaacgtaaacacaatagctacagctgcgcggttctgtggaacttcacgtgcgatctttaggacacggtcagattgtaacaagagtaatagaaggtggaattcgcatcttctcttctgaaatagtaattcctgctgttttccgttgtcagattcagtaacgtcaggcggtcataggtgcaattgtacgtgaggttggttacttcatatctgtaatgctgctcattagaatcaccagggagttgcgggaagaacgagcaaatggacttataaccagacccgagtagccaagataaaaaatcttccgttttattcttgagaccctgaaaagtaacgttaccgccgacggtccctgagtaattagcgcaagtaatattcttgggaatctgacggttgggagacttccattccacaggagcagtcgtcgtgctgattgaacaattcgcaaaaacataataacagtacgcggcaagtagtaccatcaatctccacgctctaagcatcataacgatactctttcagccttacgatcaaaatattgcactagtggtgacgataaacgatgcaaaaacaaaaaaaaaggacgtgctacaatccgagtcacttttaccgtacccagacaacggtgctttatagactcatcacttaaggcgggatgtatttgcaagtcagcaaagacgacagttttttcgccgagagaaccagcggctgcatcacaaggccggcatctgattccctgtgcctatttcactcctcatttatacatatccagacctcatgtgatacgaggatcatcttacggggaaaaacccttgtcttatccagtgattgggtcccatatcatcccctgagaattcctcactatcccccggaccagagccgaacgattccaaaccggatacgctacatacctgccacagtgggcagcttttaccatgccagaaaactcggtcgcgatccttatagtcaaagatgacgacgacgcatacccgtcgttcggcaccctacccgcttcgcacgctcagtacggctttcgactactacgcggcatatttttgattacgctcgtcatctggaccgtagtgtggctcaaactgcttcgagacgctcttttataaaaacatacgcagaaaacatttatgttccgtgatctcctgtggtaacatagcaacaggaacctgcactttccttgaattatgttctcataaactgtaccgtcctggagtacgctatgtatcacgcgtcttttcatggagcgcactgtatgccgacacacggagataacgaaggaaattccactcgcagatctgccttgtctggagatggggtaggaatacaacggcgtttaaagtaaagacagatgaggcacatggtgaaaataaagataatacatataagtagtttattacgatctttcatgacggagtggaaaagcggggttgtacaatttctgagagctacacaaagcacaaatttatcctgaatgaactagtgtgggtactttgtaatcacggtatgtgggtagcgttgtttctagttcgtagtttgcgtttcagggttgccggaacgttaaagtaagtcaaaacgcagattataattaccgtcaccacggcagctgtccaaccagcgtgaatagatatgtgggaattggtgtgtttagaatgacgtggagacaatacggtaataatataattggtgctgtttatggtagtagtacaattgtcaagatagtttagtatgtcatattcatcatagtcacttgtattacatggcaaatcgcattcatacacgtattccgtgtatgttcctgaatcgctagatgtaacgttattaagtctgagaccttttgtgtcgttaaaacatgtaaatcgcggagagcatgatttgttttcgtggtactgtttatgtatgtatccgttccatccacaaagttcgcaactgccgtagttccagaaactggaatagttgcagggattattactaccgttcaggtaaactgtatctccctgagttaccgtgatgggtctttctacatgttgactttgcgtaaaaaatcgccggtaaaatgttttttcttgttcatgtaaaagtaccggaactaaaatgctagttagaatggttgcagttgctattagcgcggctagtaacagtagtttagtgttacattgtatacccatgtttttaataactatgaatattctgcttcacaccataagtgcttaacccacaaaaaccacacggagacattattggctaaaaataaaaacaaaagtttattgatgtgcatgttaggttttagtctaaaattcatctgggtcgtatttgggaagttttgtataacgcggtcttctggggacgcgacggctacccatgtataaggctataagtgccacagataccactatacccgcccatacagcatgaattcccaggggaatgttagtgtttttttacagtttttattacattgtcccacgttctgctattatgctggtctgattcctcttttgttttacatttatcaggtataggagacgatgttgcagttcctgataacacggttaaatagtagttttcctttttaccgtcactgtaacgttgcaaaacgtattttccagcgtgttcggtagttacgttgtatatagtgagagaggtcttattgcagtctaaacacatgccgttcagtggggaagttgaataataatgtccaatgctgcacagttggtgtgcgcgaggtccatattttatccattctatatcgtgccatacatccgttctactgcagtttttcaaagtgacgtatccaccgacatatcctgttacattaattacttcgtaatttaaattagagtgtttataaacggtgtacaaactgccattgcaagttatgttgctggtattcaaccagggagtagtactatgaatggtagaaaacgttaatgttggcgtagcgcttgacgatgattttgaaagcgttgaagtggttgctgatgcgactgaagaagcggtagagggtttgtgcgtggttccatttgcgatagctgaagtgctgttagcatcggtgacagagttagaagaatttgtgatagtggaggcggtggaggtaaggcaattgcacggacaggagcacgtgtcattgcaaccttcagatatcgtaatcatcagtaacgtccacttaaccgtaaatctccagtccataacgttattaaatttcggttaacgggcattgatgtttcttcggacgttgttgatctttcttgcccgtttattttctgatatggtctcataagacatttatccggaaacgttgcttagtcctcgtgctcaggattgtatcgaactatgaattctgattcacttatatcgtcacttaatggatgatattttttatttagagctcgtcggacgaaaaataggagaatgcaggctacacaaattaatgctaacgtccacgtagtgcgtctgccgtgtgatgtgttagaatgattgttatagcggtataaatgatctatagatgatgtggctgtattgtcttcataattggtcggtttatgagaagtgtcccattcgtgctttggttcttcacatacccagggattcacgtgtgtcccgtttgtgttgtttctaggatgtatttgcagattaaagttttgattttgttcggagggatgcccagttttataacatcgaaagctatatttaccagaatgagtaaaattaagaccgtacagagataaagataaattacgatcgcatgtaaaacataaatcatagtgatgttttagataatttgtgtgccactcacatagtatacgcgaatggaggattttcaatgaatggttatgatattttccatttcttatgttgggatgggtgtattttccgtgtgtggatatattaaaatgtctaagccaggctgttttgtagcacgatgtgatggttaggttgtgtgttatagtaatattgtctccttgtgccgcctccaataatgtttcagattcttttgatatcgtattatttgtactgttaggcgatgagcaagttggaagcggtgtagtgacgttttcatttgcatttatcatagtagtagtgttggttgataatgatatagtttgcaaagtcacagtactatcggttacatgctgtgtcgatgaattcgtgtcgccgtttggtgaagttgttattacagttacgttagttgtagatgtttgggtagatatggtggaaatagttgaggtcacgtctgtgccttttacagagcttgcagtgaatcctgtggatgtgttgacgttgccattggaggatgtgaacatagtggtagacatttcggtggtttgtaacgtagatgtcagttgtgtagtagatattaagcttgtgggtgtaatcgacgtggaagtattggcgatagtggtgttgttacacttgcttttctgcagaatccaaaaaataataaacatgcatattatttgcgtatatgatgacttgttccaccgtcgatgttgtgtgcgcatcttttactccaaatccccgtccaccgtcaacaacagaggttccgtatctaggtccgtccgcaaccgttcagcgtcctgttccccgattcgttgcgaccgcagaaagcagatgaccagtgcgccaacaaagatcatcagtcccgaaacccaggcgcaatggagtgagaggccggaccactggcgttttaaatccgagataattgctcggtctgcctcttgggaatccgtaaccacaactctccctggtcccggataaaagcatcgacgcgtttccaaagctcggcagaagctacgtgggtggatgatgaggtaaaaagcctcgacatcaccggtatactgatcctgcaggaggtagactcccgtatctttaaccgtaagattgtacagcgtgagattttggcgcgtgcacgtgaaagttgcgccaccctgatgcgtggtttctttataggcgtctgtaatgatgcaaagtggcggcatacgacgcatgtatctgctgtagatatcataacgttgccagactacgctgtgatggctagtgttaagcctggtaaccagagtacgtgtacggtcctcgcaggtggcgcggtaattggcgagctttaggggttttttggttggttcgacggcgttcgatgaacttccctgagttgtgaacaaaaacagcgacgtgactatgacaagcgtgaggggggtgctgtaggtctgcatggtgcaaaacacgttctcgccttccttgtcagacgtcgtcgtcctcgtcctcttcgtcgtctgtgcccgtcggttcgatcaacggggagttatctttctgtctggagggtcggtatggaatccgttcgtagatgttctgctttttagccgcgtgttgttccagctttttgcgtgtcaggctccgataggccagacattgatctacctcggtgcccgtgttgtttttctcctcctcgcgcgcgtaaattacgaagaagaccaccagcaggactatcagcgtggccacgaacgagcccgcgccccaggccgagtatgcgcctagcattgtaatgggttctgtgacccggcatttgcacatcgcgtggcacttgctgccattggtagatgtgctattcggattgcacttacatgttaggtgggtattttctgttttcacgagacaattggtggtaaccgtattttcggcgcaaacggccacgtagcttatcaaaccgagtgctaaaaagcacaccgcgtgcattacacgcggatacatattaaaacaccgtgttccacaagcaccgcacacgtcgatcctccccgcacggtcttcagcccgcccatgacatgatctccctcacgttacccttcaacactctgtagtactctgtctcggcttccggtccccatgtcctaatcataacaaaacaccgtgtcactgtccatctccctgtcttttcgcgccgccggtcccccccaaaccatgtctctagatgccgccagccaccaaccggcggcacggcggctcttggattcggcattggtgcgccgcgtcttggcctgcatgatcatcgtcatcatgatcgccattagcatctggatcctgacctacgtgctgtttttctaataagaaccccggcccctgacggtaattttcctttcttctccgtttctcctcagctgccgtacgtgatgcctcacggccatctccgacaggccctctccccgacctcctggacatgtgagggcttgttgctcctcctgggattgctggtgctcttctttcaccaccacaaccagtcggccgtagagaggcgtcgccgcgtctcgttcgtcgaggtcgatcgactgccgcatgagagcggatggtattcttccgatgacgacggagaccgggatggcgatgaggaaactggagagagccacaacagaaacagcgtgggactgtccgctgtttttagctgagactggcgtgcgacctgtaaaccgttactcgggtctcaagatggtttggaagttgtgactcatcttcctgtgggcaatgcccaaccggacgcgagtgtcccataaaagccgggcgctccggcgagaccatgccatcctcgccttcggacgccccgctcctcttctctctcctctcctccccgctgccgcggccactgccgccgccgcccataccatcggcatgtcggccgacaaatcgcagctgtcgtcgtcgccgccgcagctgtagcagttaacgtcgccggccttcaggaggagatggcgctctgcgtcgtctcttcgtcccgcctccctctgtggtcgtgggtggtgcgagagtacacgatgggtggctctcgtctcgggggaccacagggggaggggggtaatttattattcgtattactgtaattttgtatcgcttaatttgtttagagccgcacgcttgacaacgccttgtatagccttatttatcccgatgacttttttctccgtacaagaaatggacgtcacttgagcagacacagtttcatcgaccacgacagtctcatgatctgactacctctgacccgccaatgagaaaaccgaaaagtaaaagatgaccgcgccctcggagtccttttttccttttcaatcatgaaagcaagaggcagccgagagaatgccagtaagagacgaccatcgcagacacagtacgatactcatcttagaacgaaccagcgaataaccatcacacgtacagcagaatctcatgaactagtcaaccaacgtcataaaatcttcacacaatcgtttttgcgaacttttaggaaccagcaagtcaacaaaagactaacaaagaaaaaccatcttggaattaaaaaaagtagcatcgttaccttatgaaccagcagcattcagtatatacaccagatataatatatttattaatgtatcctctctttctcctgatgtaattttgtttttgtaaattcaattgttgaaagtctctccctgggggaattgcatatcttattgatgaagaagaaatccctgccatatgtgttgtcaaactatcattatttctctatatgggtattttttttctaagaagcaaaagactagcagcagccaaaataaacctgatgaaatctttaactgaactcccagtggtctgtgtgtatatttctgttggtggtcggttgtctgaacccgggtgggttgttcggaaacggcgggacggggaaacggatggaaacagcgtcgctatatacgtgacttttgatctaaacggacgtcgctaggctgacagtttacgaattgctaaacaagatagtcaggaacaaaacaagcggggctttgcctggtaggatttcctgtggaaacaataaccggatgtgattgtggctggtacataagctggttctggctgcaagcgcttttcactgcattaggtttggcgtttgcttttgcctgggaacgctatggctataacgggaaagaaccggtttggcaacattccattgtggggggggggtacttatagcgtgcctagctatgacgttgatatatgtggatgcggataatactcgtaatgagctaaaagcgacgactggtagtaattttaccattacgcataggaaagatccgttgacaactaagtggaaaaccgtttttggtaacaatggtgatcagtggttgtgcaacgttacgggtataggtaatgctactgtgaatagtaacgcaactatttgtgtgtcgagctgtggtcataatacgttggatttatgtaatttaaagtcgggagattctggcttcttcgatctgtctcgttggttcggtgaaaacatggatgaatacagtggtgatgtgtggcacttggaagtcagctaaatgttgtatcgcttagtgaattggtgttcttacagttttcatgtaataaactacgtgtaattcgttaaatttgtgtgtttttttgttagtattctgcgtaacggtggaataaaattgcgttgacctagttagatttcctgtgtagaacaatgaccggacgtgcttggactggtacatacgcaggggctggacgtggttaccggtcactggactcggtttcgctgtagctgtggttcaacctgaacatggctcccagagctgctaggaaccggtccagtcacattttttggtgggtggggggtactaaaaaagtatttaatattggggtttaatgataaaatccaggttatggatatgaggaaactgaatacctcgcagggtcgaaatcttaccacagttgatgatagaagacggttttccatcgggtgggaaacatgggatgacggtggagagtctctatacgatgtgactaataatggtacaacggtcatcaatacaacagcctgtgtttcaagttgttcgcatacgtcgcttgtgctttgcaatatgacgcagcagactgattcgttgtacggagtgggtcatcggttgaatgacgaagaagatggtgaactgtggagagtttcggtttcttaataatcccatacgacgtgtgttcatttatatctgaattttaggatgatgactatagtataactctggggaacaaatatcatacgttaatcactttaagttacgccgttaggaaaagaaaatcagtccgaatgaagcatagtcagccgaatgatacagcaatagcttgtttacaacgtgttcttttttacattatgaacgtgccttgctttttatacacacatggagacagaggtccctcagcccttgtcacgacaactccctttttctaaaccgtatgtgctccaaaccgcatctcctcatcgtcacgtgaaataccatgggaccccttttcgtcacacacgtctttccgcttactcaacgcgtcagcccgcgctcggcagagctaccatataaaaacgcaggggtttagcggcttccccagatcgctgctgccccggcgttctccagaagccccggcgggcgaatcggccggctggtcggtcggcgctcggacggatggggagaacggcggtgacttagccgcccgtggccgggagaagacggaggagccgagatgacaacagcagtcgtggaagggtcgccaagccccggtccttctcttctgtctggtcgaatctcgttttcttttttcaaccgctctttttgtcacctttttatgtgagtttctcttccgcgtctcccggccgtaccatccacccatgcagcatgcacgcgtgtatgtatgcatcgtctctcctccgtcccgactaccatcagcagcaccactaccgccacccccagcgccaccaccgctgccgtcgccaccgcgttatccgttccccgtaggctggtcctggggaacgggtcggcggccggtcggcttctgtttttttttttttttattttttatcttctcctttccttaatctcggattatcatttccctctcctacctaccacgaatcgcagatgataaacaagagggtaaaaagaaaaaagctacagacatttgggtacctcagctttccgataactcgaagaattcaaagtcgacgattcccaacaagagaaaacagaacaaaaacaaggtcatttttatttatcctcatcgtcaacaacaactaccgacaacaacgaaacaccaccaagaatgtcaatccgcaagggtgttcctgccccctcgacgcgcctgtcgcgatcctcgtggcgaggaccgcgatctccgtataggtagatgaaattatcccgtgtccggtcctgattccccgcatgccctgcacatcctgacgcgtcggtcagcagccaaacaatcataggaaatgaaccagaagaacaaaaagatcatctctctcggtgtatagcaacaccaacaacaaccgcatcgcaacatcttcatccgcaagacggaaagaaaacaacaataatgagaatgaaatcaccacaaccaagccagatttcacgtccatgagtttttattatattattatcaaaacgaaaaacagaaaaactgtcatagataaatataaaaaaaaatagaaaccacaaacgactactagtactccaatcttagatgtatatgctcctagataagatttagtattaccataatcatcgaagaatgaaagacgacgatgattccttaccgctcctgccacccggtctgtatgtagagagagaagagagaaaacggtgaatccaagatccccgggtcggcgtcggcatgccgctgatcgcagtggccccacctcggcatgccggcgccgggcgaggaattgctcatgaaaaaagtatctttctgtaaaaaaagaaaacaatacatgattaaccgaaaagaaaccaacaaaaagaacccgagatcagtcgatttcgatcactacgataaacacatggaagatttcttgaaaaaagaaaagagaaagagaccaccttcccggcggcggacacgctcctctccgtcgccgttctgcaccatgattcgatcaataacaacatcatcatcggagaccatcttttaatcaatcagcgttgcagtagtcgactccctggacacgaaggagtcatccatttttatcctcgcacttcttcgctctcaaagccgcctttaaagttgaaatgaaaggatggaaacatggaatacagttttaattgcacgtatcaccattttactacaaaaagaaaaaaaaacaacttacacatagtattaccttaggtttacggataagtagagtgtaggcgtttttgaaacagttcagccaatgcaatcttgtctcggcataatcactctttctgcatataatagtagtagtagatttattcacatcaacacagcgaaaaactccagcatcaaagtacacctagagacagcccttaaaatatagtttgcagcttttagatgtacttacaccaaagaagattaccgtccttacgagaaaacagatactcggatataggaatcaagacagctctgcactgaaaacacactctcctgtcacgacaccgcgccacaccagaggcgtacgcgtgacttcatcgcaacgatccatcgtgatgtccctcgcagaacctaaaaagaccaaaaaaaaatcttggaccacagttgtcgattcttgaagacaatattctcgtgagaactttgagattcgcacttgaaacctcttaggatccacaaaaacaacaacctctgtatggaaaatgcgctattttatctcagcttttctcccaaacctcggtttcttcctattcttatgttttccctagtatatttgcctccttataagaaaagaagcacaagctcggtcgcacggattattccttctgctaatctattattttgttccttttttttttctttgccttcacccccttcactccctgtagcaacacagagtagtagacacaataaatgagaagtttgcatgcattttttgccgtgtccgtggtctgttatagcgtgtggagtgctcgggatgggtggacgtggggacggattcctgaggctacaaagatacgcggagacgtcgtggcgaggggatgggtttattggatatcggtgaagcagcgtggcggcgaaagacgcgatccctgggctggtagatccccctaccacgtctaccagggacgtttatccttgggacacgtaaatgtctcggccggcatccacgcgccacgttcaccgcgtcgtgcccagcgccatgtgcgggtcgtttcggcgtgaagttggacggcgtagtttcggggattgtgaaccgtggctgagggtgtagaagggacaggaaagagcgtgtgatctggccgagccgtagcatgtgggtgcgatgcggtggatgtggtgggctggggtggttttgggcgtggagatgtggagatgggggtgatccggatgcgtggcaataggcctcgagcttgggcttctcccgcggatggtcgttctaattgtacacggcggccgtggcctccgagtaaaaaaaccaggtgctgacgccagacagagacgccgtcctcggaatcgtgtgcgcgaaagcctgttccgcggcagcgtacgacgttccagtcagcgaggccgtcgcgttggcgcgccaacagtaaggttacgacaggttggcggcccatggttccgaagcgtccccacatgcaccagcagtcggcgtcgaagtcgcttgcgctgtcggcccagtcgccaccgccgcggcggatttccgcgcgtgggacggggtagccgagcgctgcgccctcgccaatgttgtgaagtagatgcgtgagttgatgttgattctctgtgcaaaaatgagcgctttcctgtgggttggcgttggggtatgtgtgtagttggggttgtgtttgaccgtagaggtgttggcgggcctgtgcgcaagcagcgtagtccgcggcgtcaagctccatgtgcgtgcggtgttcttcgtcggcgtgtttgtccgaggtttggacatgcggttgtgtgttgctgtggtgtaagggtaaggtgtgttggtcctctgggtgaagcggcgtggtgtgggtgctgtttgtgtctgtggttggcatgattgtgcggcatgtgtgtgtggtagtgggtggaggttaaataggcgagctgcgtgtgcgtgccgtctgtgttccccgccgcgaaaggcccccgtccccggcgccacccccgtccccgtgtccgccgcgaaaggcccccgtccccgccgcaaacgccccgtccctgccgcaaaaggcccctgtctccgacgtcaccccgtgtctccggcgccacctccgtccccggtcccgcaacgcgccgtccccaccaccgtccccgccgcaaaaggcccccgtgcccggccccgcacacccacgcacaccccccgttcccggcgcaacccccgtccccgtccccagcgtaactcccgttaccagcgccgtcaaccccagtacgcccgaaaacaccgccgtccccgccccgaaaagcgaagcgccgcgcaaaagcttagtagaaactccgtgcaaacacccgccgcgaaagccctccgagcgcccgcaacaccccgtccccagcgccggcccgtgaacaaacaccgcagaactccttgacgcaccggcagcgcgcaggaagcgccgtggggaacacgccgcagaagcggcggcgcgcttacggcgccaagaagtcgcactggcggcggtcggggtgtgtctggggcgcggctgggtgggtgcgtgcgtggggtgggtgtcgggtgtgccgggtgtgtcagggcgtgtgccgggtgtgtcagggtgtgtcgcgggcgtgtggcgggtgtgtcgggggtgtgctggcggggtgtgtcaggggtgcggtgtgcgcggctggatggaagcagtgtgccacggggtccgcgacccccccccctcccctgggcgaccgcctctgcgtgtgtcctcgacgcgggttgtgccgtacttcgtctgtcgttgccctcgcggtcccctagggacttcctcttttccgcgtcttgtctctggccgttgtttttcgtgtgtccccagggacccgcgctgccgtcccctgggaactccctcttttccccggggaatcagacagacacagacacgcgtcttctttgcgacgtgcgccgcgcacgtcgcttttattcgccgtcgccgtcctccgcaccacacgcaactattcgccgtccacacacgcaactccaattttcacccccccgcaaaaaacacccccccgcccctcggggactgcatgttccacatgtacgcgctagacgtgtaatccactcgcagttcggggacgcaacgcagccagatcacatccccttgcagtaccagacgcagggctagttctagagcggccgccacggcgatatcggatccagacatgataagatacattgatgagtttggacaaaccacaactagaatgcagtgaaaaaaatgctttatttgtgaaatttgtgatgctattgctttatttgtaaccattataagctgcaataaacaagttaaagcggggtttgaacagggtttcgctcaggtttgcctgtgtcatggatgcagcctccagaatacttactggaaactattgtaacccgcctgaagttaaaaagaacaacgcccggcagtgccaggcgttgaaaagattagcgaccggagattggcgggacgaatacgacgcccatatcccacggctgttcaatccaggtatcttgcgggatatcaacaacatagtcatcaaccagcggacgaccagccggttttgcgaagatggtgacaaagtgcgcttttggatacatttcacgaatcgcaaccgcagtaccaccggtatccaccaggtcatcaataacgatgaagccttcgccatcgccttctgcgcgtttcagcactttaagctcgcgctggttgtcgtgatcgtagctggaaatacaaacggtatcgacatgacgaatacccagttcacgcgccagtaacgcacccggtaccagaccgccacggcttacggcaataatgcctttccattgttcagaaggcatcagtcggcttgcgagtttacgtgcatggatctgcaacatgtcccaggtgacgatgtatttttcgctcatgtgaagtgtcccagcctgtttatctacggcttaaaaagtgttcgaggggaaaataggttgcgcgagattatagagatccgcgtcaccttaatatgcgaagtggacctgggaccgcgccgccccgactgcatctgcgtgttcgaattcgccaatgacaagacgctgggcggggtttgtgtcatcatagaactaaagacatgcaaatatatttcttccggggacaccgccagcaaacgcgagcaacgggccacggggatgaagcagctgcgccactccctgaagctcctgcagaagcttcgaattcgagctcccgggtaccatggcatgcatcgatagatcgcagccttaattaaggatgcatgtttaaac

SEQ ID NO: 9 - DNA, 233739 bp, Human cytomegalovirus
catgctgtggtaccaggatacatcgcgggaaaagagtcgctggcgaaactcggccagcagacagtgcagttcttgccgaaacttggtgcccacgaagacgtacagcagcggattgagacaacagtgacaaaaggcgagcgactcggtcaagatgagcgcacgtttgagagatctttcgaactcgcagctgctggagatccatttgaggagttttaacgtgtccacaaacagcgttaggtggtacggcagccaaaagatgataaagacaagcacgaccgctataagtacccgtacaatgcgacctttgtggcgcgactgagacaccgcaacgattctggaaatgcggtagtagcagtagctgataacactgagcgggatcacgaaagcaccgagcatgagttctacgttgaggatgatcgggtaactgacctctaagtagtcgtagtcggtcatacattgattgttttttttggtcaccaccataaagtgtggaatggcgatgatcacggcaaagatccaccaaaaaatactgaaaaggcaggcctgttttacaggccgatatctcatgtaaacaatagcgtagtagcgatcgagtgcaatctccgtgataaaacacaaactggcaaacatagccacgtagaaacaggcagtgagtaacgtacacggcacgctggctagggagttgtgatctaggaggtattgcatccacagaggtagtgtacaaacgaaaagcaaatcggcggccgcgaggttgataaagtaaacatcgccggagcattgaatccgacgtcgccaggtgatggtgaagatcaccaagaagttgccgatggaaccgaagagaaagacaacgccgtacagaaacaacgtaactggctttgactgattaagcacgtcggtgaaaacacaaggagtcgcgtcttcatcgtagtcaaactccgtcgtgagttccgcggtcgtcgtcgtcggtgtcatgatagcaccagttctgccctcggtgcatggacgccgtctggtccacgcaccgagagactgaggcagcgtccggtttggtctatatgagcggttcaccacgtcggcgagatgacgttttcacaccaacctcttcgagccgacgtgaccacgaagaaacgtgcaattagcaaaaatagatgtgcggcggacgcgtgagagaggatcgaattacaacagaaattcctcctccccggactccataggtgcattttttctgtcataatgggtacgtttggtgtgtttggcccttctttgtatgtccttttgtagctcaatatcaatgtcctggtaaggtatctcctgcttcacgcagcaacaggcgaatacccttagggttgtccacatgtccttcctcatttgagtgcctactaggatgtagatcccaggattcagacaagcgcgaacgtaggccaaaaactgaccgacgtatagacagaagataataacgttttgaagtgtgtcattgtacactcccgccagaagacggatggattctaaaaatagcgccaggttgaaaggaaaccaaaagctggcaaaagacacaaccacaaccaaaagaacgtggagcgtctgcatgtgccatttaccaacgtagttaatgataaaccgcaccatacggttgtacgtgtacgccatcagcgcgatgggcgccaggtagccgcaaatgttaactttggtgttcaaaaacacggggaaccaacccgacgtctcgttagcgaattcaccaacacactcgttgttggtatggctgtacatcaggtaatgtggcatccccatgagcacggctagtatccaaaaaatcaccacccaacaggtggcccgcttgttatttcgcacgcggttcaattctacaccccaaacgatgacgcagtagcgatccatcgacaggttgatgagaaaacaaacgccggcaaaaagacagatgtagaaacaagcgttgagtcccgaacaaaccacctctcggctgagtttagggtgatgcttggcatattctagaaaaaacggcaggccgacgacaatcaacagatcggctacagccaggttgcagatgtaggtatcgctcggagattttttcttacgacggtagtacaggatggtggtaatcaccagcacgttcagaaacgtgcccacgatgcacatcaaccatacccccaaccgagtgtactcgaacaactgataaatttcggtgctgtttaaggtgtggtttgtcatgttgctcacctgcgttaaggtttgattatttgtagaggtggtcatcaccttacaggtactatcacctgtcgaacagtcctgtaaaaagcattacacgttagtcgtctaagcacccagattcctcacatacagtttcaccgtcccttggcttacctggtgtaagtgtcaatcacaaaacccacgtctagacctcacggtactttttatgtcctaaagccacgtgctattctgacgcactttgcggtcgcacatgttccaaattacgtgagtctttgacgtcgatgtcagtcttttcgggtggtttacagaccggagctgccaaccgcagcccacgaacgacgtgaacaagccacgtcactgaagaaactccataaaataggctgccaagtgccgctccacgccgcggcaccatgcgccagtcctatcgctacgcgtctggggccgttgttcggaggaccctcaagggtttacgaaagctcattctctgccaagacttgcggcaggacatccgccacttagttcgtagctatgctgatatgaacattagccttcccatttcagcgccacccggatggcgtctagattttgtagagtttgaggacatctttggcagcgcggctgtcaccgacgggcccgaaacgccctggggtcagctcatctgctgcgaagaatcgctcgagtctctgggcgtcctgcagttctctaccaccgtgttgcccagagtacacgggccgcggtcctcttctgaggacgaggactcggacgatgacgactttttcgtgtatgtagaggaaattgagccacctagccaggcccgtctggtgctcctgttaggacgttacgaaaccgtgtggtgtctagaccgcgatcgcggggtgctttactacctggcgcacagtttggacgattttgcgcgacacgggctgttgcactgcgaggccatctacggcgagcaaatgcgcacgccgctgctaaccacgcaaccggatcatattatctgcgaccttcgcctgcacgacaacagcatcagcgaactacagcgtgtgacctgtcgttatcgcggcgaatgcgtgcctctgcgcactccgggcgagatgacacgtccgctactgctctgcggccaggccgagaacctcaaaggcgtctggcccttcatctgtatggagacggagcaattcaacgacctgttgaagttctttgtggaccgcttatgctgtgaaaccatgataatgggtgtggtgggcgaatcgctaccctccggcgtctttcacgccgatttcgtgatcctggtcgaccgagcctgcgaatttttctattttgacgtgtctcgccgcgagatctggcggttggctgacagcgtggatatgttgttaacagtgggtctgctcaaaatttaccaggccggccggcgttttcactacgccgtggacgacgccgaacgtctggaagtgccgggtcgctgcccccacgaaaactttcccttctgggaccgctttgggaccgtggagcgtgtacgggcctctacacgccatcacgaactacgttataaatggttaatccgcaaggacaggtttatcgtccgacccgactggtgctctatgcgtaacagtctggacgaagtctccggcaccgccgatgtcagttgggatccgcggatccgacccgactatccacaaacctccgatctggagtgtgccaaacaatattggcaagagctcaacgatcatgtacgcgaacaaacagcccgctacgggcccgtgcggcgttacagcgtctggtgcggcatgagctctcgcctggaacgggcggttaaacgtctacaacagcggattccccgtcagaacctgatgaatcccagcctgatgaaccaaggactatgcgtctactactcggacgaagaagaggatcaagaggaagacgacacgtccgacgatgacgaccaagaaaaggaaaccgaaaatccacaaaacaacattggaagcctcactaggactccctcctccccaggatccctggagggcgtcgaggaacgcatgctgaacgtgatgaaagaggccgtcgcggaacaagataggaaaaagacacagaagaaacacaagatagacacggcgcaacgccgggtgctcacccgccgggcggcccgggccgccgtgctggagggccgccccacgcccaaacctaccatgcctcatcctgtttcttacttgcccttttggatgtaaaaacaacatcaacagtttacgagtacaaaacaggaaaggaatacaaataaaaaaagacgccgtgacactttggctctttcctgtgcaccgtcatcggcacgtgctcttttttgaaatccgagaggtagccaacagcagggagccagatggcgacggacgtcgggaccgacggacgcgactcggggtccttcggttagcggtctgttcaggtggatgagggctcttcacggtcgggcactcggctgtgcctgtcatccacttggagagctcccgcggtccgattggccctccacaggcgcgttggacggggcgtcggagagtataaactggggcgggcgcggggtggcgaagcgggaagcgctgatgtacctgcagctcgaacgtctctccggtaactatcggcggccggggctgtgaaccgctcagtggctcggaccgccggctgtttctgcgcaccggtccgaacgctaggtcggttctcagaccgaggcaaatcaacgtcgcgaacgacggtgaaaaatcggagcactttccgcggcgcttgggagcggggtgacggtgtagcgttgctttctctgtatttggctcggcttctgtcagtgacgccggttgtccggctgagagtgtcgctcaatgatggatccggctgcgggttctggccctgacggcgctgcagttatgccgccggagctccccgcgctgcctgtggcggccgaggatcccatggcgttataccgacaagtgttgcgggattttaaggaactgttcttttgcctggagccaatggaaatcacgcgttacgttcatcgtaacgagggacgctgtctgtccttgggtccccccaagggctggcatgtgatgttacgtacggaggacgggatcattaccgccgccaaacaggcggcgtcaaagctcatctgttgccgcgagccgttgacgccgttgggatacgctgttattttgttgcccgagccacgtcgcgatcaccatgatggcatggtggctactccgtacgtggtttttatgggtcgcttttctcgcgtctacgcctacgacactcgtgaaaagtacatggtgttggtatcgcacaacctggacgaactggcacgttacggtgtgtcacgttcggagattgcgtatcgcgacgtgattcacaccactctgcggagaatgacggtacccgttccgcgacgatatcctaagggcgcgcgtaccatgcatgttttgtttctcaatgacaccacgcccgagggctcgtacgccacggccgaacgaatcctgggttgcgacgtaaagttgcatacaccgggttacggtacggtgattatgcggttgatgaaaacggtacagcagttacaccgcatttggcccttttgtgcgctcaccgaggtggagagccgtcgttggtggtgggctgtccgtgctaatctggccacgccgtggtatgtgctaggcgtgacgggacgtccgcgaccgggacgcagttttgtggccgaagtgctggtactgctggactggttcggtgccgtgtacgccatccagatggacgaccccaaccactatgtgcggcgcgttgccaacaccatcacggagtttttccgcatggggttgctgaaaatggtctttcgacaccggcgttttgagcgcgagcgtcaacgtcagacgcgtatggaacaccgtcacctgtgcccgcaccaccacgagcgtgccgtagaccacaagcgggacattctcttcaacgaagacgccgcgttgcccgatgagcgacgcgagcgcgagcggcgtattctgcagcagcagtatgactggctctgtttaacggagcgttttgacccgcacgagggcgcgtgggagcgtctggaccccaacacgttggtgctacaccgctacgacaccaactcgcagagctacgtgttggatcccgacattgtcggtgtggaagcagccgagcgcgaggccgctggtcatcaggacgatacgggcccgcggctgcattgcctggtgacgacgcgttcgtcgacgcgcgagggcgcggagcgggtgattaccgccctggtgcatcagtcgcggttagtgacgtactcggacccttttcccttaaagagcctgacgggtgtgcgcgagtacatccagatttgaacgtcgagcggaggacgcagaataaaacgtgtcgcacaaagaagtctctttctctgcttcttttctggggtgtctagctggcggcctcttttgacatgtggcgtacacgttgggaagacggagctcccacgtttacgcgaaacgatgaattcctctattgccacacgcgctacgaaacttttctgcgggtcatgggcgactttcagggcatcttcgagtgccagtacagcgccgacgtgcttcgcgactgggtccgtaaccacgtcgaccaggtgctgtcgctcggcattccgcacaactggttcctgcaggtacggcccggcagcaccatgccggagctacgcgaccagctgctggacgacgtgatttattgccccgaacgccttatcgtgctaggcaagtgcgtgatcatggtggaagatcactacgaagagacggagctggtgctctgcatgggtggcggtacgcgcctctacatctacgaaccctcgcaagagattctgctgctgtgcgcgcgtcatctggacgagctggcgcgttacggtatgatgtacaccgaagccgtataccgtcagccacagacgccatttgctacgcgggtaccgcacgacgtggtagcgatgctgctgcgtcacggtcatgacgccgacgcgttggccgcctgcgttggcgaacaccacggacgcgacgtgaactttcatacacctggacgccatgccaaaacgttgaaactcctgaccagtttcggctgcttgacggactgctggcccttcgaggtagcgccagccgcccgcttggccgagtgcgaaatgtacgtcacgctgcaactgcgttgccgctggtacctgctgggtgccgtgggctcttaccgcgccggtggtttttttgacacgtccttcctcatcatcttcgaccgtttctgtcgtttttacgtggtgattgtcaagtcgcatctggaccgctcgccgcccctgcagcgtctagccggtgaaatctaccggctggccgacagcctagaggaactttttcgcgccggcctcatgaaggtgtacgtgcgtcgccgctacgaacacggtctacggcgcgcggccaggctggaacgcaacggaggctgcgtacacatgggcgaggcggcgcgtctgcactttaccatgttcgacagcggcgtagaccgcgactacgcgcggcagtttcgctggctctgtcgaggcgaccgttttcgcgccgaaatgctcaataactgggacggttgggacgcgtttaccatttggcaggcgcgcgtggtccgcggcgacttcgcggaacgtcgtcgaccgcgttccttgggagacggtgaagaggaagacgaaggaaacgacggccgcgccatgccggtcgtccgccgtcggccgccgcccatgccacgcgacgacgacgaagataaccacgtcgtacccgacaatcagaacctggaggtaatccacgacgccttggcggacgatgaggagcagggagaggatgatgacgacagcggcgcagaacctatggaacccgaagaaaacaacgtggtacccaacgttgaaagaagaggaggggaagacgcggttgccgcgcgtatggccgccggccacgagagcgatgacgacgagtgggaagacctaggctttgaccttgaggaggacactgtctttgacctcaaggacgtagacgaatggtttgagcaacggcgtttggcagagaaagagcgttggcacctgggtcagcgtattgttaacgcctaccggacggaggccgaggtttcggaagccgaagtggaagctcgacgcatcaatctgaatacggatttgtctccggagtgggtcaagagtttcgattttcgggagcactttgtgtaggcggcgcgtcccaccccccgggccaccagccgcgattcgtctgacgctgctcctatattaagctttcgcgcagcgcgctttatccgactcgctgtcgagacggctccgccggcatgtccctactcaccaaagccgccgccgaagcctggggcacctatctccgacagcgcgacgagcgctgcgaagatgctatccgctgcgactacggcgtttttcaatttagaaacaccgtctttcaaaagacgttatcgatgctgcaaggcctctatctgcgccagtacgatcctccggcgctgagaacctacgtgcaacgccaccaaggaaccaccgtagcactgcgcaaccccgccaactggttcctagtgatgcgcgaacaggccgccatcccgcagatttacgcacgttctctggccgccgactatctctgctgcgatgacaccctggaagccgtcggtgtactagccgtgcgtccacccgacagcgatctaacacgaaacaccaagcaggcgcaggaactgccctgcgtgctcatgctaagtcattacggcaccgtctacgtctacgactgggagaccgacgggctctacgaggtggccagtgatatcaaagccttttccaagaacggcctactctggtgcgaatatgtgtatcggcacccacaaacgccgttcgccaccaccgaaccgcgctatcatgtgcaaaaattcctctgcaccgaccccactgacgctgcggccgtggccaagacggcccgcgaaatgagcggtctcaacctggtcatccgcacgccgggtcgcaccgaggtggagccgttgctcatgctgggctccatcgagggcctgcgcgcctgccggccttttgaccacatgccggccgcggactttcgcgatcttctgaactttattcgtcaacgcttgtgctgcgagtggtacgtcgtcggcctcgtgggctattacctggcctacgggccttttgtgcccagcggcctggtgctgctcgacaagtttggcgtggtctacctacacaagatcgaggactcggacctatatcgcattgccgataattttcacatgtttctcaagtgcggtctgcttaaactgcgtggtctctgccgcttcgaccgcggattgcgcggcgagtgtcggttggaggagctgcccgtctgtcaccacacgctgaaaagagacgtgctgcgctggcacggcgcactgggcaccatcacacgctcgcagctagagagcgctctggactggtttctgcgacctactcgcggcactgacaaggtacccaacaacagcagcgcatggggccgcacggacctactgcccacgggcgcgctgcaagacaaccagaactgggccttcccctctcacagcgtcgaaacgctgccggcgctacaggggggattatgggaggataacgatgaaaccacgcagaccgtggatggacaacgctgctttcgcatgcccaagttctttccgccgcccatgtgccgcgttccgtacaacgaatgcggcgtcgaattaccgggcggcgatagcagcgacgaggacgagagcggccgcccccggagaatcgccaaccgtataggcgatactccagaaaccccgtgtaatagcgaaaacgaggacgacacgacggtcgagggaacgagcggtgggcctgaagcgatggactcccaggctccctacccgtcggaagactcgccgaccacagagaaagaggcctggttacagcgcggccggcgagcaaaagccatgcacgcccgcggacacacgctgaaacaggtccccatccccgaacccgaccagatgggagacgacggaccagacccgggtccctaaaagcagattccctttccccgtttttattcatcataaacttatgattctgcacagataaatttttaataaaataataagccggcagctgctttctttttgcaaatcacgtgtgtgcgttttctagttcgcttcgtgtatttagacgaatctcggcgataaccgccggcgttgccgccatgtcgctccgcggtcaggtccagatagcccggtcggtcttcctgctgcgcatctacatccttatctgggtgcaatgcctcatccttatgagcgtctgcgccttttgctggctggtgttgccgcaccggttggagcagctcttttccagcgtgcgtctgacgctgtcttgcttaatgatctccatcgtgtgcctaggtctgttgcgttgggccgagcccaactttcccaaaaacgtatggatcttactgacgtacacgttgcttaccagcgtggctgtcacggcgtcaggcttccactttagtcatcgttcagtcatttatgccatggtggccacagtgacgctattttgtttcctcacgctcgctacgtatctgtttgcccgcgacgtggaattacagcgttccctattgacgggcgcatccacgctgattctcttactgttcgccgtattttctctttttcccgaggcggtaagtgagatcctggtgatgatagccggtttggccgtcatcgtgacctcggtggtgtgcgatacgcaggacatcctgcacgacatcgagtatgagagttatatcccgggcgcgctctgcttgtacatggacctcatgtacctctttgtctccgtgctctacttcatgccctccgagcccggcagcgcccacactgctcagacgacggtcgctgccacagcagcggcgtcgccccagttcgtctcctaatcgacgtgtccgcggcgtgaccacgtcaccgtgccccactcgctcgcttgtgtataagagaagggtaggtgcgccgcagcggctttgtgccgagaccgtcgccaccatgcaggcgcaggaggctaacgcgctgctgctctcccgcatggaggctctcgagtggttcaaaaagttcaccgtatggctgcgcgtgtacgccatcttcatctttcagctggctttcagcttcggcttgggaagcgttttttggttggggttcccacaaaaccgcaacttttgcgtcgagaactacagcttctttctcaccgtgctcgtgcccatcgtctgcatgttcatcacgtacacgttgggcaacgaacaccctagtaacgccacggtgcttttcatctatctgttggccaacagcctgacggcggccatcttccaaatgtgctctgaaagccgcgtactagtaggttcctacgtgatgaccctggcgttgtttatctcctttacggggctggcgtttctaggtggccgtgaccgacgtcgctggaaatgcatcagctgcgtctacgtggtaatgctgctttcgttcctcacgctcgctctgctaagcgacgccgattggctgcagaagatagtggtgacgttgtgcgccttctctatcagcttctttttgggtattctggcctacgacagtcttatggtcatctttttctgcccacctaaccaatgcatccgtcacgccgtctgtctctacctggacagcatggccatctttctcacgttgttgctcatgctctcgggtccccgttggattagtctttcggacggcgcgcctttggacaacgggactttgacagccgccagtacgacggggaagtcctaatgcctataaaaccgtgcccgttttcacagcagccgcgcttgtcgccatgcttcatgtcgtcccgctagaatggaccgtcgaggaggtagtcccctacctagagaggctggcggtatggctgcgcgcctccgtcctcgtcgccttccagcttaccgccaccgtcgccctcagcgtgctcagctggtggctcatgccgccaccggtggccgagctatgcgagcggggacgggacgacgacccaccgccgctttctcatctcagcctcgtcgtgcccgtcggctgcctgttcctgctgctacgcggtccgtcgatcgaccgttgtccccgcaaactcccactcctgttggcttactgcctgccgcacgcgctagcctttctgaccttgctgatgtgccagccgtcgccgcaggcctttgtcggcgcggctcttctcgccctggcggtagatctcagctgcctgggggcctcgcttttgggttgcgatcctggcgcgtctctccggcggctgtggctaccgtcggtcctgtctctgctctgcgctacggcgctgggactttggctgctgcgggccgcggccccgttctttctcggtttacacgcgacgacgctgttgacggtgacgctgatgctaattcacgatctgtccctgatcacctgtcagagttctttcccggagagttttcagccctcgctacgcctctatgtcgaaaatgtggctttattcatcggcatgtaccatcttctgaggctctggttgtggagcccatgacgacgggtcggatacagggtgccgccacggtttgaccacactcgtgacgtcaatcaaatccgcggtaaccgggtgctgataagacggactgtttcatcgacgcctaccttagaccgacagcggtcgtaagcggcagcatgggcgacaccgcctcggtttccgaacaccatgagtcgccgacggtcaccatcgtgccgctccatcgcagccacgcgctggtggccgaacagcagctcttccaatggttgaaacgctttaagctgctcatggaggtctatcacgggctcgtgtggcagctggcttgtaccctcacggtctgcttgctggcttggctcgccttccccgatgtgcagggacagtgcgccaacggcatagtgccagccctatcctccatcgtacccgtgtccacgctggctatgctacgcggtttcgccgagtttcgcccacacaccaccaattttgctcatctcacggtggcgtgcttgctgatcaacaccggcatcaccgtgtgcacgggcttttgcggagaaaggcgcgtcatcggtctgtcgtttgccctggtgatggtctttttcgttctctgcagcggtctcacctacctggccggcaacaatcccacgcgctggaaagtcatcgggattggctacggctggtccgtcatcgtcttttacctattgctttacttttcgcccgtgctgtgggtcagcaagatctacagcggactctacgtcctggtggtgaccgccgcttcggccgtgcttatttacgagaccctggatctcatctaccagcgtggaacgttgtctaaaaacagcgtctgtgtcagcgtcgtgttgtacaccatcgtcatgagtctcctaaacatgagcgtcgccatatttagcggccacgtctgggtgcagcagtacgccgagaaacacggcggacgcatcgacggcgtgagtctcctcagcttgttgtaaaaagatgggggagatgacacgctcccgctcgcttagacattccccaccttccctctagagacagacgatgaaccttccccacccagtagacagacaggacaccgcaactcggtgttgtactcgtgttttttattcaacaataaagctttttcacgcttactcgagtgttacgtgactttatgggggaacgccgtgtgggaatgacggtgattctattacactctataaacggtttctcatacgcgccttttgatcgccaccgccgtcatgtctccgaactcagaggccaccgggacggcctgggcgcccccacccccgcgaccctcgcgcggagtcattatgatttcctccgtgtcgacgaacgacgtacgtcgctttttactttgtatgcgggtctacagcaccgtggccgtgcagggcacctgcaccttcttgctctgtctgggcctggtgctggcttttccgcatcttaaaggcaccgtctttctctgttgcaccggctttatgccgcccttaagtttgatggtgcccaccatctgtttggccctgctgcacggcaaacgcgatgaaggatcgttcacgtcgccaccgagccctggcctgctcaccatttatagcgtgctcacgacgctttcggtgatcgtggccagcgcctgctcctcctctacgctagtgaccttctcgggcctcttggcttgcgtgctttttagcctctgcagctgcgtcacgggtctagccggccataatcaccgtcgatggcaggtcatcgtcacgctgtttgtgatcggcgttatcgcgttcttgatcgcactttacctgcagcccgtaccgttggggcacaaactttttttgggctattacgccatggcgctcagcttcatgctggtcgtcacggtctttgacaccacgcgcctgtttgagatcgcgtggtccgaggctgacctgctcaccttgtgtctctatgagaacctggtgtacctgtacctgctcattctcatcctcttcaccaccgaggactcattagacaaactcatcgcttggatgacctggttatcgtcacgcgccaccggggccaccaacgcggcctccatttcgggctgtgaccttttgcgggaggtacagagaaacctcacgcgaaccatggcgtaacggaaaaactcgtcgtttcccccacccgccgcgccggccgtctccaccaatcaagcctgttagaaccgcgggccgcccaaacatctaaaagtccccccacggatctcgcgtcttagacgcgcggtcatatagcctccggctgtcatgggtctgcgctttcccaccgcgacccagcgacagatcgtgtttcggcggctgttcgacagcggcaacaacgacgactatgatgaagcggccgtggtggccgtgctgggctgggtgcatcgcttcgaggttgtcgtccgaatcgccggcttgctcctcttccaaatctccgcggcggtggccgtcttgggtagcttctctctggtcttccctacagcgactctcaagtcgcgtccgggctttccttgtcacgttgtctgggcgcccgaggtgctcctcctggtgcctgtggcctccgcgctcttcgtgtatttccgctatgagcgaccggttctcgctcagcgaaaccggcacccgcgctgccgtcgtccgttccgacagctggtgctattactcgccggcctcctggcgcacatcccggcgctaggtgtcacgtgtgcctgccaggagccccgcgaggtgttgacgtcgtttgtgctcacgttggtcatcaccttgctctgcgcggaagtagtcttcatctgtcgcgacaactgcaccctgtccgatcaatttaccctcatcaacggcgtctgggtcgtggtctttctggtcaacgttctcatcgtcttcacgcggccctggacttggcccctgcggctgcttttgggcttctacagcacggtgggccttatcttcgccggtcacttttcgcagcaggtccttttcgtccgtcacgttcttatgccacgcgatgtggcgcatacgtcgctacagctctttattacgttcatttcccttttttttctgatcttgcgaatccgcaactgtcaggacctgctgagcgatctacgtctcttagaactaccgtcgtccgacgcgatgacgttaacgccgaacgacctgtcccatgcttcgtcgtcgacgccgttgtccaccctctcgccctagattttcgttcggaactggttttcggacagagcagccgtttccagagaacgcagcgcaccatgagaagagaaaaagggtttcaagtacccaccgatggcacggtcatctacgtgccccccgggatccaagagacccggctggcgacccgcagtctggcttgggtcgactgttgccgcgtggcgctgcacacctatggcgccgtgggttggcagctggccggcttgaccgcgttgttgagcgccttctgctacgcggcgcccgcgacgtggtttcaccattctcgtctgtgtctcacggagtcctcgcccagcctcgtctttgtcatacccgtcacgtcagtgatcttcattcactgttacgaaacatcgcatcccagcaatatcggcgttctgctcttttacacgctgcttcacgtgccgccgttgatcgtgatatgtctctgcctggacggtacgttggtcatctcggccgcgttgttcaccttactggcctttctcagctgcaccggcgtagcgttgttggctcccgaacgtaccgtccgccgtcagatcgtggtcgtccatgctttgatcacgttgaccttcacggcaatcgtggtggtcatcttgaggcgtggttggtcctggtgctttaagatcgtcttgtccttcagcgtgctcattacctgtctagccgtctcgcatttccacgaagcggccctggctgtacgctacgagacgccgctggaacgcgcgcttttggcggccgtcaaggtgtttctcagtctggttttcactctgctgatggtgctgagaatcatgaccctgcgcacctttttgcaaacctacttttcctctgacaagctgtagcttcgagaccttgcggatacgccgccgggcgctgcggtcccgacatggagacagtttccacgcagcgggaaaccgcgtcgtcggaaacggagcgtaccagggaagccgcgtccgcggaaacgacggacgctactttccgatccttggaagagggaagcacgatctcctcccggtattcggaaacagcgtccacagtttccgaagatgccgtgtgttggctacggcggaccgcgattgtcatgcgtgtctacggattgctgacgctggaaaccgctttcagcgtactcattagcgcgctggtttggctgggttacccctcgctgggctacaagtgcagcgacgatccctcgccgctattgcttagctgcacaccagtattggttctgggcgcgctggagctcaccgatcacagacaccccagcaacggcctggtgtttgcgctgtatgtggcgcttctctcgttcaccaccgccgggctcaacctgtgcgccacagcgcccatcggcatttctagcctcatcctaacgtggacgttgttcgtggcctgcaacggcgtggcttgggagcaccgtctcagctccgtgtggcgtgacgcgctttttacctccacacttttgacggtgatggtcagcgtcctggcttctacttacacctggttacataagactttgctgtgtctctacaccgtgttcgtgggctgcatcctggccgtccttttccaagacgtgcgctacatcgccaccaaaatgcccgtgagccacgtcatccgcagctcgctgatactttacgccaccgaaacactaatctatcacaccacactcctgatgctcacgcccgtggtgtggtcggcacgctgggaccaaatgttcagctacctggccaagctcggcacctatcatcattacctgattgacaacggcacgctcagcgtcatcctcaacaccaccactgcgacgttccagagcaaggctgcctgagctccgctggtttataagaagactccaccgagacgctcacccgttcactcgggcgcatcacccgcctcatggacccgccgctaccgtcgctacattcgccgcaatgggcttccctcctgcagctgcaccacggccttatgtggctgcgccgttttgctgtcctcgtccgggtctacgccctagtggtctttcacatcgccatcagtacggctttctgcggaatgatttggctgggtatccccgattcccacaacatatgtcaacatgaatcttcccctctgctgctggtttttgccccctcccttctctggtgtttggtcttgatacagggcgaaaggcaccccgacgacgtggtattgaccatgggctacgtaggcctcctctccgttaccacggttttctacacctggtgctccgacctgcccgccatcctcatcgactacacactggtcctcacgctgtggatagcttgcaccggcgctgtcatggttggggacagctttcgcgctaagcgttgggagctcatatgctcacgggtactcaccagcgtttttttcatcacgctctgggttatcggcgaccagaccgtgttccatcatcagcgtattctactctacggctacggcgccatcgtcttccttatgatgaccgtgactttctacggcacgcgttacatccgcgacgaactgccggctgctcagacgttacgcggctcgctgctgatctacgtaggactggtgaccatgtttaaaatcacgctgatcgtgctcagtcccaacctctggcgcctgccctggacgaccgtctttgccgccttcagatcctcgtattgcgaaggtggcggtggctcgtagccaccacccatcgtccccctttctctataaaacttgccgggtacctaaagcccccacgactgttcgtcgagcacccgtcatggtacagatccagtttcaccaaggcgagccactcggccataagaaagagaaacccccacccgtgtcgccgccgtcaccaccgccgatccgtcgagtcaccgtaatcaccaaagatgaagacaccctgcggagcgttcaacactttctctggatggtacgtctctacggcactgtcgtgttccagaccagcgccaccatagccactaccatccttttcatgctcataccgtggcgcgtgacggccccctacctgcgcgatacattgcccttctggagcacactgctaccctgcgctctgcgttgccacgcgtactggctggaacgtcggcgccgacccgggaccctgatgctggtcatggtatataccaccctcactacgatatccgtgtccaccatcgggctgtgtttcgatcgcaccgtggtaatccaggcctatgtcctgtcatccatgctctgcgtctggtgtacgggcctagcctggctcatggcctggaacatgcaacgacggttagccatcctctgtttgctaagcttcatgcttcccatactctggctcttcatcgccgtgcagtcctgggaaccataccaacgcatcattttagcactgactgtgagcttcatctacggcctcaagatcgtgcttatccgcgacacattaacggtgctttatcgctcaccgtcaaattgctacacggacggcgacctgctgcgcaccgctatgctgctatacatggaccaagtcattatgtttctgctcgtggtagtacccctgacggcccccatctggtatccaaactacgccggggccctaggccgcacggcacactggctttttcataaataaaaaaaaacgtttctatcacctaatctgtcgtactgtcctttgtcccccgcaccctaaaacaccgtgttctcccgacgtcactagatcaccaccctgttccccgtgacgtgcaagactacatgctataagacagccttacagcttttgagtctagacagggtaacagccttcccttgtaagacagaatgaaccttgtaatgcttattctagccctctgggccccggtcgcgggtagtatgcctgaattatccttgactcttttcgatgaacctccgcccttggtggagacggagccgttaccgcctctgtccgatgtttcggagtaccgagtagagtattccgaggcgcgctgcgtgctccgatcgggcggtcgactggaggctctgtggaccctgcgcgggaacctgtccgtgcccacgccgacaccccgggtgtactaccagacgctggagggctacgcggatcgagtgccgacgccggtggaggacgtctccgaaagcctcgtcgcaaaacgctactggctccgggactatcgtgttccccaacgcacaaaactcgtgttgttctacttttccccctgccaccaatgccaaacttattatgtagagtgcgaaccccggtgcctcgtgccttgggttcccctgtggagctcgttagaggacatcgaacgactattgttcgaagatcgccgtctaatggcgtactacgcgctcacgattaagtcggcgcagtatacgctgatgatggtggcagtgattcaagtgttttgggggctgtatgtgaaaggttggctgcaccgacattttccctggatgttttcggaccagtggtgatatatagactgaagcggagtgcatctcgagtcgctcggaaacgactcaccagactttttgctttaacccaaaaccatgctacgccggggaagcctccggaaccctctggcgatctgcctgttgtggtggctgggagtggtggcggcagccacggaggagacgagagaacctacctacttcacgtgcggctgtgttattcagaaccatgtactgaagggtgcggtgaaactctatggacaattcccctcgcctaagactttgcgggcctcggcttggctacacgacggggaaaatcacgaaaggcaccggcagcccatcctcgtggaaggcaccgcgacagctaccgaggcgctgtacattctgctgcccacggaactgtcgtcgccggaaggaaaccgaccccgaaactactctgctaccctaacactcgcctcccgggattgttatgaacgcttcgtgtgcccggtatacgattccgggacgccgatgggcgttttgatgaacttaacgtacctctggtatctaggcgactatggggcaatactaaaaatttatttcggactgttctgcggggcctgcgtcatcacccgatccctcctcctgatatgcggttattatccacctcgcgaataaaatgatttgttatgatgtcattgttgtttactgaaaaggaatgtgctttcccggcatgggcccgattccgagaaatggtatgatgaatcatgtggtcaggcgctgctctcaacgtccatataaacgtgggtttcggtgaccacaaccacgtcggggctgacgcggatcggacatcatactgacgtgaggcgctccgtcacctctcgggccgaaccccgtcagcaccccgcgtcacttacaaatcacgttcgtcgtgacgggggtttcccctgacacgtaatactcgcgtcacgtcgggacgatataaagaggcacggtgtttcggctcccgcacacagacgacgcgccgggcggcttcctgcggccggccgcggtgccggcggctatgatcctgtggtccccgtccacctgttccttcttctggcactggtgtctgatcgcagtaagtgtactctcgagccgctccaaggagtcgctccggttgtcgtggtccagcgacgagtcgtctgcgtcctcgtcgtctcgtatctgtccgttgtcaaatagcaagtccgtccgtctgccccagtaccctcgcgggtttggggacgtgtccggctaccgtgtctccagttccgtgtccgaatgttacgtccagcacggggtactcgtggccgcctggcttgtgcgtggcaacttctccgatacggccccgagagcctacggcacctggggtaacgagcggagcgcgacccatttcaaggtcggcgcaccccagctggaaaatgacggggctctacgttacgaaactgagctcccacaggtggacgcacgactctcttacgtgatgttaaccgtttacccctgcagtgcctgtaaccggagcgtgctccattgccggccggcgtccaggctgccctggttgccgctgcgggtaacgccctcagacttggaacggctgtttgcggagagacgctacctgacattcctctatgtggtactggtgcagtttgtgaaacacgtagccttgttcagcttcggtgtccaggtagcctgctgtgtgtacctgaggtggatacgtccctgggtccgaggtcggcaccgcgccaccggaaggacctcacgggaagaagaggctaaagacgattgactggcgaagccgccatgaggcggtggctgcgcctcctcgtcggcctgggctgctgttgggtaacgctggctcacgccggcaacccctatgaggacgacgactactattactatagggaggacgaaccgcgacaacacggtgaaccgaactatgtggctccgccggcacgtcagtttcgctttccgccgcttaacaacgtgtccagctatcaggccagctgcgtcgtcaaggacggcgtgttggacgctgtgtggcgtgtacagggtacgttctatcccgagaaagggatagtggctcgggtcggctggtcgggccgtcgcggacgaaagtggggccgtctgcacgccccggagtgcctcgtggagaccaccgaagccgtattccgtttgcgccagtgggtgcccacggacttggaccatctcactctgcatttggtgccgtgcaccaaatgcaaacccatgtggtgccagcctcggtaccatatacgttatttcagttacgggaattcagtggataacctgcggcgactacactatgaatacagacacttagagctcggggtcgtgatcgccatctgtatggcgatggtgctgctgttgggatacgtgctggccaggactgtgtaccgtgtatccagcgcttactatctgcggtggcacgcctgtgtaccccaaaagtgtgaaaagtccttatgttgatccgtgtgtctcttttctatgtaaatgtttttatataatacacgtggtttatttttataaaaaaaaaggtcgtattcgtcatttgtgtggggaacgggtgtacaaaacggacgggaaaggctaactcgcgtttatatacttatatccgccaggaacgataaccgtgtccgctcaactttctaattgacatacggtaatgccatgcggatccagctgcttctggtagctaccttggtggcgtctatcgtcgccacacgtgtggaagacatggcgactttccgcacggaaaagcagtggcagcaggacctgcaatacagaagggaatttgtaaaaaggcaattagcccccaaacctaagtccaacatcgtggtatctcacaccgtcagctgcgtaattgacggtggaaacatgaccagcgtttggcggtttgagggacaatttaatcctcacatcgcatcagaggtcatccttcatgataccagtggcttgtataacgtgcctcatgaaatacaaaacgacggtcaagttctcaccgtcacggtgaaacgtagcgcccccgccgacatcgctaaagtactcatctcactgaaacccgtgcaattgtcttctggacagtacgaatgtcgcccccaattacaactaccctgggttcctcgaccgtcctcattcatgtacgacagctacaggctgtggtatgaaaaacgatggcttaccataattttgtacgtgttcatgtggacctacttggttacgctgctacagtactgcattgtccgttttataggtaccaggctgttctatttcctgcagagaaatatcacaattcggtttaccggaaaacctacatataatcttttgacctatcctgtcaagggctaataaactgttaggttcgttataagcgtggatggtcatatataaaccgtatgcacaaaaggtatgtgtgaatggaaatacatgatgaatgtcatcatcacgcaaagcagccgtgggaatggtaaagacatcgtcacacctatcataaagaatgcaacgctttcaggataggtgtggcgaaagcctcctccgttccgtattctatcgtaacaaatatatggagtttgtgtaatgcgtacttcatgccccgatgaacgctctcgtcaggcttgtcatggtctgtaaaagctgcatgaaaaacacgacgaaagcgttcagtgttggatcagactcacgtcacacgttacatcatacaacgtagggcggtattgttgagaacatatataatcgccgtttcgtaagcacgtcgatatcactccttcactatggatctcttgattcgtctcggttttctgttgatgtgtgcgttgccgacccccggtgagcggtcttcgcgtgacccgaaaacccttctctctctgtctccgcgacaacaagcttgtgttccgagaacgaagtcgcacagacccgtttgttacaacgatacaggggactgcacagatgcagatgatagctggaaacagctgggtgaggactttgcgcaccaatgcttgcaggcggcgaaaaagaggcctaaaacgcacaaatcccgtccgaacgataggaaccttgagggtaggctgacctgtcaacgagtccgtcggctactgccctgtgatttggatattcatcctagccaccggttgttaacgcttatgaataactgcgtctgtgacggggccgtttggaacgcgtttcgcttgatagaacgacacggattcttcgctgtgactttgtatttatgttgcgggattaccctgctggttgttattctagcattgctgtgcagcataacatacgaatcgactggacgtgggattcgacgttgtggctcctgatgctgttttatcgtctcaataaaagcgcgttccttcaacacggcattctctacgaacggtattttttctgtcgcgatagtcgacgatatgtcgcgatagacaactccggtcgctaactgataacgatatgtcgcgacaatcgccgacaagccggcccgttgtgtatgcatgtcgcgacagagaggtgtagcgggctgtcacatcaactctatcgcgacagacatccccctgcacgtccatgtcgcgacacgaccactaatccgcacctgtcgtcgacatgtcgcgacacccgggtcccctcatgccctatcgggatatcgccgtgtaatgggggtgggcgactgacgtgactcttgacgtttataaaccgcatgggaaagtacggtgtcgccaccgttgacgtgggcggcgatgagaacgtcagcggtggcgaaaccgccgtgcggaaagtcccggtgccgaaatcaccgtgtgaaaagtcccggtgttgaaaccgccgtgtggaaagtcccggtttggaaatcccagtacggaaagtaccgtaacgcctcttttggcacgtagttgcctactacgtaggggaaacaacgtcaccaagaaacgctatatattcaaaaacaccgttcagtccacacgctgcttctcagcgaagcactgctgcagccagaccggagcggtgagcggagccgagcagcggaccttcggagccatgaagccggtgttggtgctcgcgatcctggccgtcttgttcctgagactcgcggactcggtgccccggcccctggatgtggtggtatcggagatcagatcggcccactttcgagtggaggagaaccaatgctggttccatatgggcatgctgtacttcaaggggaggatgtcgggcaacttcaccgagaaacactttgtgaacgtgggtatcgtctctcaatcttacatggacagactgcaggtgtccggtgagcagtaccaccatgatgagcgcggagcctatttcgagtggaacatcggtgggcacccggtgacgcacaccgtggatatggtggacatcacgttgtctacgaggtggggagaccccaagaaatatgccgcgtgtgttcctcaggtgaggatggactatagctctcagaccatcaactggtaccttcagcgaagcatgagagacgacaattggggtctgctgttcagaaccctgctcgtatatctgttctctctggttgttcttgtgctcctgaccgtaggggtgagcgcccgtctgcgatttatttaacaggtacgaaccagctggtacctgaaacctacctgggctgcaaggtacggactctaacacccaggccgcggggtacggactcgaaggcgcccggtaggtcagcgtgtctgataccgggcgccgggactctggtgctatggctgctcaatgccaccatgaactgacgacggcgtggtatccacgctcgttcaataatctcctgagacacttgaataaataaaccggtttattcgtaactctatctactgtctccgtgtatttttatcgggaatgggctaggataatcataagtttacgggaggaattggcaggaaagacaaccaaaacgtcaggaatctgggaggtggctgggctcacgtcactactctgggatataaattgggaaagagcgtacagtccacacgctgtttcaccatgaacaatctctggaaagcctgggtgggtctttggacctccatgggtcccttgatccgcctgcccgatggaatcactaaagccggggaagacgcgctccggccctggaagtccacggccaagcatccctggtttcaaatcgaggacaaccggtgctacattgacaacggcaagttgtttgctcgggggagcatcgtgggcaacatgagtcggttcgtcttcgatccgaaggccgattatggcggcgtgggagagaacctgtacgtacacgccgacgacgtggagttcgttcccggggagtcgttaaagtggaacgtgcggaacttagatgtgatgccgatcttcgagacgctagccctgcgtctggtactgcaaggggatgtgatctggctgcgttgcgtccccgaactgcgagtggattacacgtctagcgcgtacatgtggaacatgcagtacgggatggtgcggaagtcatacacgcatgtggcctggacaatagtgttttactccataaacattaccctgttggtattgtttatcgtgtatgtgactgtggactgtaacttgtctatgatgtggatgcggtttttcgtgtgctgagacgcccgggatcgcggtttatttcaataaatctagccacgagtacccattacgtgtgtcatgtcggtttcgtttattggaaaaaggttgggagatgcggggtggtgctcgagcgagagcactgacaggggtggcaaaacgcagttgagcggggtatgcgtgttcagttgggcggcaggggcatgcggccttagcggctcgggctggcgtgctgttttccgtgttgccgacggcggcgcggtccgtcgagaccggcggaccgcggagcggaggaggtgacctggctgcttaatgacagcgacggagaggaagaagagatggcgtccgggctcggtgacctctcggtcggcgtgtccagccttcccatgcgggaactggcctggcggcgggtagccgacgactcgcacgacctatggtgttgctgtatggactggaaggcgcacgttgagtacgcgcatcctgcgtcggagctcagaccgggctccggcgggtggcctgagcacgccgaggcccagtggcggcagcaggtgcacgctgctcacgacgtgtggtgtaactgcggagactggcagggacacgcgctacgtagccggtcgcggaccgcggagtcggggagaagctcctcgtcatcctccgtgtcggtccttagtgacggcgatcagcagccgtggtggaggaggctacgcgtgaaaagacccaaattcccatcttgggcgcgacgctggacgcagcgacacgactcggaagaacgggcttcgcagcaagcggagaacgacagcacgtcctgacaacatatggactggagagactttcaatgatgaacgtggtgaggggcgtgtgtttgacattttttcggccgcggaggtgctggcggccgtggcctgtggcccgaagatgtacacatatcgaggtacatgtcccgcatattttgcgagagatgggccgcggttctatccccgaatttgggcggtggcggccttggcggtcgggtctgtcttttatgatgctccgactgtcggggcgcagaaacttttccgtcggtggaaccgtgccgttgctttggcggcagcggaggtgggccggggcccgttttgcataagcgcggaggtttgtctggcggcttatgtttctggggtgggcgcgacggcaattcgtcgtaggtaggatcttcgtcgtcatcctcgggttcggacgcgcacaacgggatgacctggtggccttcggtagtgaagcgttggtcgtaacattcttcaggcacgacaggcatgggtctgtcgatttcggcgcctcgtcgttgagtggccttcagcagtctgcgttgttttatatcgtcgggtcggctgtccccgaggacccaatgtgattcgtcgagatccaaccaggctttgtggtcgtcaactgtgctgagcgggcgccaggactcgtcatcgtatcggagcgcgtagctgacgcttgcctgagcactgagcggtgggggcatcgttgcagcgtccggtttggtttggcgagatgggggtggaggttgttccatgagccaaggaggtttcctaatctgatagaaaccgatatacttttcgggcaattgactttgacgctctgtcatgacggtggtgaggtcgagaccgagagttcgagcgtccgaaagacgaaatgcgaggggatcatttatggggtcaccgcgttgttcgcgaaacatgaactcccactgcccgtgcggctcgcgcgcccacagcgcggcgcgcgggtgcaggtgcagcgcgtcccagcgcggccgctcccactgctcgcggtccagctcgggcagcagccgccgcgcggcctcggcggcgggcgccgactcgcgtcccagcgccagcgcgcccagcacgcccgcgcgcagaaagtgcgacagctccgccgccagcgggtacacgtgcccgtccagcgggcagtacccgaacacggcgcccagctcgtccagcagcaccaccagcatggcgcgcggcacggtccccgacgccgccggacccgccatcgctgtcgaacccaccatcaccgtcggcgccgctgctgctgccgcgtccgccccgaccaccgcgtgcgcgtccgcgttaggcacgcaaatcgcgcccccgccggcggcgccgtacggctgcggaggcacaggtacagcggaccccacggctcccgctatcgcgcacggcgcgtccccgccggcggcctccgtctccgtgccgctcgccgctggcggcgacgtcgtccccgccgccgtccccgtcgccggccccgccgcgcagcccagccaccgcgcgggcagcaccgcgcccagcgccagccagccgcagcacagacgctggttcaggtgccgacgcacggccgtcagcagcgacgcggggtgcggcgccgacgcgaacggctcgtactgcgccagctcctgccacgcgcccagcagtaccatcggctgcagtcgcctgcccggcgtctgcagcgccaccgtcgtgccggcccaccgccggcgcagctcccgtccgagcgccgtcgcctcctcggcgcgcagcaacgtctgtcggagcgccggctgaggcagcagcgtcgcgcgcggggtgcccacgcccagccggttgcagcggtacagccgcaccacctcgcccgcgccgtgccgaaaccactcgtccgcgtcgcgcgccgctaggatcagcgtgttgtttgccaggtcgtacacgaacacgcggaacccggcgcccagcgccaggtacagtccgtcctgcgcgcacagaccctcgggatggccggccttgtcgcccaccgtcgggtcggctgcggggtccacctcgtgcaccacggtagccaccggtacgatccacgcgtcccgcggcgacagttgacgcaggtccgtcgcgcccacgccgttcatctggctgcgcggcgtcacccgcgcgtagaatccgtacggccgtccgagcggcagcagcgtgcccgcgtcgcgctgcgaccacttgcgcatggcgcggcccgtgctgttggccaaaaacgccgcgcgccacacggcgcccatggcctggtattccagctccgtcagcgcctggcgctccaccggaatctgagacagcaacaggcgctccgggccgtgccaaaagttgccattgttgccgctactcggaggggcgcccggcggcccgcggggttctacccggtggacgccgtggcccggcgtcgtcgtagccgcagcactcgcaccagtgcccgctgtggacggcgctcccatcggcacacaagaagaaggaggagaggaaccaacccccgaaggccctccggccccgcggccgcgaccgaggggcggggggcgcggcgacatgccgttgcgctgggccatgggcgccggacacctccgacgtccactatataggaagcagacccgcgtcagcgagcacgcggtttagacacgcggacgccttcgtcgcccgtgtgccgcgggcgacacgcagctggcttttataggcagcgacgtgcacggcgcgtgctggcgccgccttggcgccacgcagtctggaaggccgtggactgggaaaggcagctacccgaaggaagacgcgcggcaggcgcgtaccactggagcgcacagccgcctcccgggcgcgcacccatctaggtggacgcccgacatccattccgggccgcgtggtgggtcctcgaggggcgggggggtgtttttagcgggggggtgaaacttggagttgcgtgtgtggacggcgactagttgcgtgtggtgcggaggacggcgacggcgaataaaagcgacgtgcggcgcgcacggcgaaaagaagacgcgtgtgtgtgtctgtgtgattccccggggaaaagaggaagttcccgggggacggcagcatgggtccctggggacacacgaaaagcaacgcccgggggcgagggacgacggccccggggaccgcgggggaaataacggccgcgaggccacacactcgttcccgcgaagccgcacaccccgaggccgcgcacaccgccgacacaccccgccaccacaccccgccggcacacccgccacacgcccgcgacacacccggcacgacacacccggcacacgcccgcgacacaccctgacacaccctgccaacacacccccgacacacccaacacacgcccgcgacacacccggcacacacccacccggccgcgccccgacacacccaaaacaccgccggtccattccgggccgcccattccgggccgcgtggtgggtccattccgggccgcgtggtgggtccattccgggccgcgtggtgggtcctcgagggagtgttgagggccgtaagcgtgttgtgtccgacgctgcctgcgcactgccggtgcgtgtcgtcccacggtatttgttgtcggcaccgggcttcgggacggtgtttcggcgcgctgccggtgcgttccacggtccttgcctgtgtcgtttccggccgcgccccgacacacccaaaacaccgacgtgcggggccgcgtggtgggtcctcgagggagtgttgagggccgtaagcgtgctgtgtccgacgctgcctgcgcactgccggtgcgtgtcgtcccacggtatttgttgtcggcaccgggcttcgggacggtgtttcggcgcgctgccggtgcgttccacggtccttgcctgtgtcgtttccggccgcgtggtgggtccattccgggccgcgtggtgggtcctcgagggagtgttgagggccgtaagcgtgttgtgtccgacgctgcctgcgcactgccggtgcgtgtcgtcccacggtatttgttgtcggcaccgggcttcgggacggtgtttcggcgcgctgccggtgcgttccacggtccttgcctgtgtcgtttcggcgctgcgcttgtcgggggttttcgagcgttctggccgccggcgatgccggggtgttgcggagacggggggtgtgcgggacggtgtcggggccggggacgggggttgcgctgggtccggggctgttcgcgccgcgtaggggaggttacgttgggtacggggacagtttgcggcgcggaccagggaacccacctcacctatttaacctccacccactacaacacacacatgccgcacaatcatgccagccacagacacaaacagcacccacaccacgccgcttcacccagacgcccaacacacgtcacccttacaccacagcaacagacaaccgcatgtccgaacctcggacaaacacgccgacgaagaacaccgcacacagatggagctcgacgccgcagactacgctgctcgcgcacaggcccgccaacacctctacgatcaaacacaacccctactactcgcataccccaacaccaacccacaggacagcgctcattttcccacagagaatcaacatcaactcacgcatccacttcacaacattggcgagggcgcagcactcggctaccccgtcccccgcgcggaaatccgccgcggcggtggcgactgggccgacagcgcaagcgactttgacgccgactgctggcgcatgtggggacgcttcggaaccatgggccgccaacctgtcgtcaccttactgttggcgcgccaacgcgacggcctcgctgactggaacgtcgtacgctgccgcggcacaggctttcgcgcacacgattccgaggacggcgtctctgtctggcgtcagcacctggtttttttactcggaggccacggccgccgtgtacagttagaacgtccatccgcgggagaagcccaagctcgaggcctcttgccacgcatccggatcacccccatgtccacatctccacgtcggaaaccgccgcaccccgccacatccaccgcatcgcaccacccacatgcttcgcctcggtgagatcacacgctttttcctgtcccatctacaccctcagccacggttcacaatccccgaaactacgccgtccaacttcacgccgaaacgacccgcacatggcgctgggcacaacgcggtgaacgtggcgcgtggatgccggccgagacatttacgtgtccaaaggataaacgtccccggtagacggggtagggggatctaccagcccagggatcgcgtctttcgccgccacgctgcttcaccgatatccaataaacccatcccctcgccacgacgtctccgcgtatctttgtagcctcaagaatccgtccccacgtccacccatcccgagcactccacacgccataacaaaccacggacacgacaaatgcatgcaaacttctcatttattgtgtctactactctgtgttgctacagggagtgaagagggtgaaggcaaagaaaaaaaaaaggaacaaaataatagattagcagaaggaataatccgtgcgaccgagcttgtgcttcttttcttataaggaggcaaatatactagggaaaacataagaataggaagaaaccgaggtttgggagaaaagctgagataaaacagcgcattttccatacagaggttgttgtttttgtggatcctaagaggtttcaagtgcgaatctcaaagttctcacgagaatattgtcttcaagtatcgacaactgtggtccaagatttttttttggtctttttaggttctgcgagggacatcacgatggatcgttgcgatgaagtcacgcgtacgcctctggtgtggcgcggtgtcgtgacaggagagtgtgttttcagtgcagagctgtcttgattcctatatccgagtatctgttttctcgtaaggacggtaatcttctttggtgtaagtacatctaaaagctgcaaactatattttaagggctgtctctaggtgtactttgatgctggagtttttcgctgtgttgatgtgaataaatctactactactattatatgcagaaagagtgattatgccgagacaagattgcatcggctgaactgtttcaaaaacgcctacactctacttatccgtaaacctaaggtaatactatgtgtaagttgtttttttttctttttgtagtaaaatggtgatacgtgcaattaaaaccgtattccatgtttccatcctttcatttcaactttaaaggcggctttgagagcgaagaagtgcgaggataaaaatggatgactccttcgtgtccagggagtcgactactgcaacgctgattgattaaaagatggtctccgatgatgatgttgttattgatcgaatcatggtgcagaacggcgacggagaggagcgtgtccgccgccgggaaggtggtctctttctcttttcttttttcaagaaatcttccatgtgtttatcgtagtgatcgaaatcgactgatctcgggttctttttgttggtttcttttcggttaatcatgtattgttttctttttttacagaaagatactttttttcatgagcaattcctcgcccggcgccggcatgccgaggtggggccactgcgatcagcggcatgccgacgccgacccggggatgttggattcaccgttttctctcttctctctctacatacagaccgggtggcaggagcggtaaggaatcatcgtcgtctttcattcttcgatgattatggtaatactaaatcttatctaggagcatatacatctaagattggagtactagtagtcgtttgtggtttctatttttttttatatttatctatgacagtttttctgtttttcgttttgataataatataataaaaactcatggacgtgaaatctggcttggttgtggtgatttcattctcattattgttgttttctttccgtcttgcggatgaagatgttgcgatgcggttgttgttggtgttgctatacaccgagagagatgatctttttgttcttctggttcatttcctatgattgtttggctgctgaccgacgcgtcaggatgtgcagggcatgcggggaatcaggaccggacacgggataatttcatctacctatacggagatcgcggtcctcgccatgaggatcgcgacaggcgcgtcgagggggcaggaacacccttgcggattgacattcttggtggtgtttcgttgttgtcggtagttgttgttgacgatgaggataaataaaaatgaccttgtttttgttctgttttctcttgttgggaatcgtcgactttgaattcttcgagttatcggaaagctgaggtacccaaatgtctgtagcttttttctttttaccctcttgtttatcatctgcgattcgtggtaggtaggagagggaaatgataatccgagattaaggaaaggagaagataaaaaataaaaaaaaataataaaacagaagccgaccggccgccgacccgttccccaggaccagcctacgaggaacggataacgcggtggcgacggcagcggtggtggcgctgggggtggcggcagtggtactgctgatggtagtcgggacggaggagaggcgatgcatacatacacgcgtgcatgctgcatgggtggatggtacggccgggagacgcggaagagaaactcacataaaaaggtgacaaaaagagcggttgaaaaaagaaaacaagattcgaccagacagaagagaaggaccggggcttggcgacccttccacgactgctgttgtcatctcggctcctccgtcttctcccggccacgggcggctaagtcaccgccgttctccccatccgtccgagcgccgaccgaccagccggccgattcgcccgccggggcttctggagaacgccggggcagcagcgatctggggaagctgctaaacccctgcgtttttatatggtagctctgccgagcgcgggctgacgcgttgggtaagcggaaagacgtgtgtgacgaaaaggggtcccatggtatttcacgtgacgatgaggagatacggtttggagcacatacggtttagaaaaagggagttgtcgtgacaagggctgagggacctctgtctccatgtgtgtataaaaagcaaggcacgttcataatgtaaaaaagaacacgttgtaaacaagctattgctgtatcattcggctgactatgcttcattcggactgattttcttttcctaacggcgtaacttaaagtgattaacgtatgatatttgttccccagagttatactatagtcatcatcctaaaattcagatataaatgaacacatgtcgtatgggattattaagaaaccgaaactctccacagttcaccatcttcttcgtcattcaaccgatgacccactccgtacaacgaatcagtctgctgcgtcatattgcaaagcacaagcgacgtatgcgaacaacttgaaacacaggctgttgtattgacgaccgttgtaccattattagtcaccaccgttatcccatgtttcccacccgatggaaaaccgtcttctatcatcaactgtggtaagatttcgaccctgcgaggtattcagtttcctcatatccataacctggattttatcattaaaccccaatattaaacacttttttagtaccccccacccaccaaaaaatgtgactggaccggttcctagcagctctgggagccatgttcaggttgaaccacagctacagcgaaaccgagtccagtgaccggtaaccacgtccagcccctgcgtatgtaccagtccaagcacgtccggtcattgttctacacaggaaatctaactaggtcaacgcaattttattccaccgttacgcagaatactaacaaaaaaacacacaaatttaacgaattacacgtagtttattacatgaaaactgtgagaacaccaattcactaagcgatacaacatttagctgacttccaagtgccacacatcaccactgtattcatccatgttttcaccgaaccaacgagacagatcgaagaagccagaatctcccgactttaaattacataaatccaacgtattatgaccacagctcgacacacaaatagttgcgttactattcacagtagcattacctatacccgtaacgttgcacaaccactgatcaccattgttaccaaaaacggttttccacttagttgtcaacggatctttcatatgcgtaatggtaaaattactaccagtcgtcgcttttagctcattacgagtattatccgcatccacatatatcaacgtcatagctaggcacgctataagtaccccccccccacaatggaatggtgccaaaccgggttctttcccgttatagccatagcggtcccaggcaaaagcaaacgccaaacctaatgcagtgaaaagcgcttgcagccagaaccagcttatgtaccagccacaatcacatccggttattgtttccacaggaaatcctaccaggcaaagccccgcttgttttgttcctatcttgtttagcaattcgtaaactgtcagcctagcgacgtccgtttagatcaaaagtcacgtatatagcgacgctgtttccatccgtttccccgtcccgccgtttccgaacaacccacccgggttcagacaaccgaccaccaacagaaatatacacacagaccactgggagttcagttaaagatttcatcaggtttattttggctgctgctagtcttttgcttcttagaaaaaaaatacccatatagagaaataatgatagtttgacaacacatatggcagggatttcttcttcatcaataagatatgcaattcccccagggagagactttcaacaattgaatttacaaaaacaaaattacatcaggagaaagagaggatacattaataaatatattatatctggtgtatatactgaatgctgctggttcataaggtaacgatgctactttttttaattccaagatggtttttctttgttagtcttttgttgacttgctggttcctaaaagttcgcaaaaacgattgtgtgaagattttatgacgttggttgactagttcatgagattctgctgtacgtgtgatggttattcgctggttcgttctaagatgagtatcgtactgtgtctgcgatggtcgtctcttactggcattctctcggctgcctcttgctttcatgattgaaaaggaaaaaaggactccgagggcgcggtcatcttttacttttcggttttctcgttggcgggtcagaggtagtcagatcatgagactgtcgtggtcgatgaaactgtgtctgctcaagtgacgtccatttcttgtacggagaaaaaagtcatcgggataaataaggctatacaaggcgttgtcaagcgtgcggctctaaacaaattaagcgatacaaaattacagtaatacgaataataaattacccccctccccctgtggtcccccgagacgagagccacccatcgtgtactctcgcaccacccacgaccacagagggagacgggacgaagagacgacgcacagcgccatctcctcctggaggccggcgacgttaactgctacagctgcggcggcgaagacagctgcgatttgtcggccgacatgccgatggtatgggcggcggcggcaatggccgcggcagcggggaggagaggagagagaagaggagcggggcgtccgaaggcgaggatggcatggtctcgccggagcgcccggcttttatggaacactcgcgtccggttgggtatcacccacaggaagatgagtcacaacttccaaaccatcttgagacccgagtaacggtttacaggtcgcacgccagtcagctaaaaacagcggacagtcccacgctgtttctgttgtggctctctccagtttcctcatcaccgtcccggtctccgtcgtcatcggaagaataccacccgctctcatgcggcagtcgatcggcctcgacgaacgagacgcggcgacgcctctccacggccgactggttgtggtggtgaaagaagagcaccagcaatcccaggaggagcaacaagccctcacatgtccaggaggtcggggagagggcctgtcggagatggccgtgaggcatcacgtacggcagctgaggagaaacggagaagaaaggaaaattaccgtcaggggccggggttcttattagagaaacagcacgtaggtcaggatccagatgctaatggcaatcatgatgacgatgatcatgcaggccaagacgcggcgcaccaatgccgaatccaatagccgccgtgcctccggttggtggccggcggcatctagagacatgatttgggggggaccggcggcgcaaaaagacagggagatggacagtgtcacggtgttttgttataattaggacatggggaccggaagccgagacagagtactacagggtgttgaagggtaacgtgagggagatcatgtcatgggcgggctgaagaccgtgcggggaggattgacgtgtgcggtgcttgtggaacacggtgttttaatatgtatccgcgtgtaatgcacgcggtgtgctttctggcactcagcttggtaagctatgtggccgtctgcgccgaaaccaaagtcgccaccaactgtctcgtgaaatcagaagatacccatttgacgtgcaagtgcagtccgaataacacatcatctaataccggcaatggcagcaagtgccacgcgatgtgcaaatgccggatcacagaacccattaccatgctaggcgcatactcggcctggggcgcgggctcgttcgtggctacgctgatagtcctgctggtggtcttctttgtaatttacgcgcgcgaggaggagaaaaacaacacgggcaccgaggtagatcaatgtctggcctatcggagcctgacacgcaaaaagctggaacaacacgcggctaaaaagcagaacatctacgaacggattccataccgaccctccagacagaaagataactccccgttgatcgaaccgacgggcacagacgacgaagaggacgaggacgacaacgtctgataaggaaggcgagaacgtgttttgcaccatgcagacctacagcacccccctcacgcttgtcatagtcacgtcgctgtttttgttcacaactcagggaagttcatcgaacgccgtcgaaccaaccaaaaaacccctaaagctcgccaactaccgtgccacctgcgaggaccgtacacgcacgctggttaccaggcttaacactagccatcacagcgtagtctggcagcgttatgatatctacagcagatacatgcgtcgtatgccgccactttgtatcattacagacgcctataaagaaaccacgcgtcagggcggtgcggcgttcgcgtgcacgcgccaaaatctgacgctgtacaatctcacggttaaagatacgggagtctacctcctgcaggatcagtataccggcgatgtcgaggctttctacctcatcatccacccacgtagcttctgccgagccttggaaacgcgtcgatgcttttatccgggaccagggagagttgtggttacggattcccaagaggcagaccgggcaattatctcggatttaaaacgccagtggtccggcctctcactccattgcgcctgggtttcgggaatgatgatctttgttggcgcgctggtcatctgcttcctgcgatcgcaacgaatcggggaacaggacgctgaacatctgcggacggacctagatacggaacctttgttgttgacggtggacggggatttacagtaaaagatgcgtgtcgcctgccgaagacctcaccatctcacgtacaggcatacggcgtatacaatcataatattctatattctgcatagagttacatgcaacagtactactaccaatactgcatccatcacatcacccaacactgcttctaccacctttgtgaccagcgtattttctactccgaataacaacacatcaacgacgccacacacatctgtcacctcacaagcgtcaaccattggcaacatcaccaacgttacctccgacttgagtactttcacaaccgtatattctacattcaatacatcatatgctaatatatccaatacggctgccactacagaattgatttcaacaaataccaacactatattatcttttaccaacgtaacagcaaacgctacatcatcttataacacaacaatcaccgtaactatcacgtcagatgaaacttcgcacaacgtatccactaatactgcacttataagcacgccatggcttacaaattgcagcgccacaacgtacaccacgtacaaccgtactaactcttccaacgcttgtcacacagagacaacaatcatacgtttcaaagaaactaatacaacaggaatagaagggagtaatgtcaccataaaaggtaattctacgtgggattgtctttcagtcgcctggatacgacattacaatcgatccacacacggacatcatctaggtcatcgtaagaacgcacatacccaatcttggtattggttacgcatccttacctctcatactgtatgtcattctcaacatgaaagaccttcactgtaccatgacttatgtcgttcgtgcaacaacacagaactacatctgtacgatctaaatatcaccaattccggcaggtacagcagacgttgttttaaagaaaattacttcacaggacatcacgaagatgaaaatttctacctattagtaacaccaaaaaatcatactgaagctattaatgctactttcgtttgccctagatacaacaccgatatcgaaaatgaagatagagagaaaggaagtcaacatactaacaatacacatcaccacaaacgtaatctctatcatagctcgcaaagaagccgcaccgtatggaccatcgtgttggtttgtatggcctgcatagttctgttttttgcacgacgagcctttaacaaaaagtaccatatgttgcaagacaccgtcagtgaatcagaattcattgttcgatatcacacagaacatgaagattgagctacgtttccgggcagacatcttatgaagctgaacaataaactaaaacattctgtaaggctcagcgttcaaaggaatattaatgcccattgagcgagaactaatattgcaatggactggcgatttacggttatgtggacgatactaatatccgcgttatcagaaagctgcaatcaaacctgttcctgtcaatgtccctgtagtactaccgttaactattccactagtactgagacagccacatcaacatacagtacaacagttatcagcaataaaagcacttcagaatctataaattgctctactgcaactgcaccagcaaccaccgtttctacaaaaccgtcgaaaacaaccacacagatatccacaacgacaaatacaaacgttgagactaccacatgtaccaacaccaccacgaccgttacttgtgatggtttcaattatacagtccataaaagatgcgaccgcagttacgaggtaatcaacgtaacaggatacgttggtggcaacataactctaaaaaatgcaatcagactgagaaatggcacaatgtagactggattagtaagcagcctcttcgtggccggacacggcgagaccgacttttacatgaactggacgctgcgtcgcagtcagacccactacctggaggagatggccttacaggtggagattctaaagccacgcggcgtacgtcaccgcgctattatccaccatccgaagctacagccgggcgttggcctgtggatagatttctgcgtgtaccgctacaacgcgcgcctgacccgcggctacgtacgatacaccctgtcaccgaaagcgcgcttgcccgcaaaagcagagggttggctggtgtcactagacagattcatcgtgcagtacctcaacacattgctgattacaatgatggcggcgatatgggctcgcgttttgataacctacctggtgtcgcggcgtcggtagaggcttgcggaaaccacgtcctcgttacacgtcgttcgcggacataacaagaaatccacgtcgccacgtctcaagaatgccggccccgcggggtctccttcgcgcaacattcctggtcctggtcgcgttcgggttgctgcttcacatcgacttcagcgacgctacaaatatgaccagcagcacaaacgtccctactagcaccagcagcagaaataccgtcgagagcaccacgagtagcgaacctacaaccgaaaccaacatgaccactgcccgcgaatcttccgttcacgacgcgcgcaatgacgaaatcatgaaagtgctggctatcctcttctacatcgtgacaggcacctccattttcagcttcatagcggtactgatcgcggtagtttactcctcgtgttgcaagcacccgggccgctttcgtttcgccgacgaagaggccgtcaacctgttggacgacacggacgacagtggcggcagcagcccgtttggcagcggttcccgacgaggttctcagatccccgccggattttgttcctcgagcccttatcagcggttggaaactcgggactgggacgaggaggaggaggcgtccgcggcccgcgagcgcatgaaacatgatcctgagaacgtcatctatttcagaaaggatggcaacttggacacgtcgttcgtgaatcccaattatgggagaggctcgcctttgaccatcgaatctcacctctcggacaatgaggaggaccccatcaggtactacgtttcggtgtacgatgaactgaccgcctcggaaatggaagaaccttcgaacagcaccagctggcagattcccaaactaatgaaagttgccatgcaacccgtctcgctcagagatcccgagtacgactaggcttttttttttgtctttcggttccaactctttccccgccccatcacctcgcctatactatgtgtatgatgtctcataataaagctttctttctcagtctgcaacatgcggctgtgtcgggtgtggctgtctgtttgtctgtgcgccgtggtgctgggtcagtgccagcgggaaaccgcggaaaaaaaacgattattaccgagtaccgcattactgggacgcgtgctctcgcgcgctgcccgaccaaacccgttacaagtatgtggaacagctcgtggacctcacgttgaactaccactacgatgcgagccacggcttggacaactttgacgtgctcaagaggtgagggtacgcgctaaaggtgcatgacaacgggaaggtaagggcgaacgggtaacggctaagtaaccgcatggggtatgaaatgacgtttggaacctgtgcttgcagaatcaacgtgaccgaggtgtcgttgctcatcagcgactttagacgtcagaaccgtcgcggcggcaccaacaaaaggaccacgttcaacgccgccggttcgctggcgccacacgcccggagcctcgagttcagcgtgcggctctttgccaactagcctgcgtcacgggaaataatatgctgcggcttctgcttcgtcaccactttcactgcctgcttctgtgcgcggtttgggcaacgccctgtctggcgtctccgtggtcgacgctaacggcaaaccagaatccgtccccgccatggtctaaactgacgtattccaaaccgcatgacgcggcgacgttttactgtccttttctctatccctcgcccccacggtcccccttgcaattctcggggttccagcaggtatcaacgggtcccgagtgtcgcaacgagaccctgtatctgctgtacaaccgggaaggccagaccttggtggagagaagctccacctgggtgaaaaaggtgatctggtatctgagcggtcgcaaccagaccatcctccaacggatgccccaaacggcttcgaaaccgagcgacggaaacgtgcagatcagcgtggaagacgccaagatttttggagcgcacatggtgcccaagcagaccaagctgctacgcttcgtcgtcaacgatggcacgcgttatcagatgtgtgtgatgaagctggagagctgggcccacgtcttccgggactacagcgtgtcttttcaggtgcgattgacgttcaccgaggccaataaccagacttacaccttctgtacccatcccaatctcatcgtttgagcccgtcgcgcgcgcagggaattttgaaaaccgcgcgtcatgagtcccaaagacctgacgccgttcttgacgacgttgtggctgctattgggtcacagccgcgtgccgcgggtgcgcgcagaagaatgttgcgaattcataaacgtcaaccacccgccggaacgctgttacgatttcaaaatgtgcaatcgcttcaccgtcgcgtacgtatttttatgattgtctgcgttctgtggtgcgtctggatttgtctctcgacgtttctgatagccatgttccatcgacgatcctcgggaatgccagagtagattttcatgaatccacaggctgcggtgtccggacggcgaagtctgctacagtcccgagaaaacggctgagattcgcgggatcgtcaccaccatgacccattcattgacacgccaggtcgtacacaacaaactgacgagctgcaactacaatccgtaagtctcttcctcgagggccttacagcctatgggaaagtaagacagagggacaaaacatcattaaaaaaaaagtctaatttcacgttttgtacccccccttcccctccgtgttgtaggttatacctcgaagctgacgggcgaatacgctgcggcaaagtgaacgacaaggcgcagtacctgctgggcgccgctggcagcgttccctatcgatggatcaacctggaatacgacaagataacccggatcgtgggcctggatcagtacctggagagcgttaaaaaacacaaacggctggatgtgtgccgcgctaaaatgggctatatgctgcagtgaataataaaatgtgtgtttgtccgaaatacgcgttttgagatttctgtcgccgactaaattcatgtcgcgcgatagtggtgtttatcgccgatagagatggcgatattggaaaaatcgatatttgaaaatatggcatattgaaaatgtcgccgatgtgagtttctgtgtaactgatatcgccatttttccaaaagtgatttttgggcatacgcgatatctggcgatagcgcttatatcgtttacgggggatggcgatagacgactttggtgacttgggcgattctgtgtgtcgcaaatatcgcagtttcgatataggtgacagacgatatgaggctatatcgccgatagaggcgacatcaagctggcacatggccaatgcatatcgatctatacattgaatcaatattggccattagccatattattcattggttatatagcataaatcaatattggctattggccattgcatacgttgtatccatatcataatatgtacatttatattggctcatgtccaacattaccgccatgttgacattgattattgactagttattaatagtaatcaattacggggtcattagttcatagcccatatatggagttccgcgttacataacttacggtaaatggcccgcctggctgaccgcccaacgacccccgcccattgacgtcaataatgacgtatgttcccatagtaacgccaatagggactttccattgacgtcaatgggtggagtatttacggtaaactgcccacttggcagtacatcaagtgtatcatatgccaagtacgccccctattgacgtcaatgacggtaaatggcccgcctggcattatgcccagtacatgaccttatgggactttcctacttggcagtacatctacgtattagtcatcgctattaccatggtgatgcggttttggcagtacatcaatgggcgtggatagcggtttgactcacggggatttccaagtctccaccccattgacgtcaatgggagtttgttttggcaccaaaatcaacgggactttccaaaatgtcgtaacaactccgccccattgacgcaaatgggcggtaggcgtgtacggtgggaggtctatataagcagagctcgtttagtgaaccgtcagatcgcctggagacgccatccacgctgttttgacctccatagaagacaccgggaccgatccagcctccgcggccgggaacggtgcattggaacgcggattccccgtgccaagagtgacgtaagtaccgcctatagagtctataggcccacccccttggcttcttatgcatgctatactgtttttggcttggggtctatacacccccgcttcctcatgttataggtgatggtatagcttagcctataggtgtgggttattgaccattattgaccactcccctattggtgacgatactttccattactaatccataacatggctctttgccacaactctctttattggctatatgccaatacactgtccttcagagactgacacggactctgtatttttacaggatggggtctcatttattatttacaaattcacatatacaacaccaccgtccccagtgcccgcagtttttattaaacataacgtgggatctccacgcgaatctcgggtacgtgttccggacatgggctcttctccggtagcggcggagcttctacatccgagccctgctcccatgcctccagcgactcatggtcgctcggcagctccttgctcctaacagtggaggccagacttaggcacagcacgatgcccaccaccaccagtgtgccgcacaaggccgtggcggtagggtatgtgtctgaaaatgagctcggggagcgggcttgcaccgctgacgcatttggaagacttaaggcagcggcagaagaagatgcaggcagctgagttgttgtgttctgataagagtcagaggtaactcccgttgcggtgctgttaacggtggagggcagtgtagtctgagcagtactcgttgctgccgcgcgcgccaccagacataatagctgacagactaacagactgttcctttccatgggtcttttctgcagtcaccgtccttgacacgatggagtcctctgccaagagaaagatggaccctgataatcctgacgagggcccttcctccaaggtgccacggtacgtgtcggggtttgtgccccccctttttttttaataaaattgtattaatgttatatacatatctcctgtatgtgacccatgtgcttatgactctatttctcatgtgtttaggcccgagacacccgtgaccaaggccacgacgttcctgcagactatgttgaggaaggaggttaacagtcagctgagtctgggagacccgctgtttccagagttggccgaagaatccctcaaaacttttgaacaagtgaccgaggattgcaacgagaaccccgagaaagatgtcctggcagaactcggtaagtctgttgacatgtatgtgatgtatactaacctgcatgggacgtggatttacttgtgtatgtcagatagagtaaagattaactcttgcatgtgagcggggcatcgagatagcgataaatgagtcaggaggacggatacttatatgtgttgttatcctcctctacagtcaaacagattaaggttcgagtggacatggtgcggcatagaatcaaggagcacatgctgaaaaaatatacccagacggaagagaaattcactggcgcctttaatatgatgggaggatgtttgcagaatgccttagatatcttagataaggttcatgagcctttcgaggagatgaagtgtattgggctaactatgcagagcatgtatgagaactacattgtacctgaggataagcgggagatgtggatggcttgtattaaggagctgcatgatgtgagcaagggcgccgctaacaagttggggggtgcactgcaggctaaggcccgtgctaaaaaggatgaacttaggagaaagatgatgtatatgtgctacaggaatatagagttctttaccaagaactcagccttccctaagaccaccaatggctgcagtcaggccatggcggcactgcagaacttgcctcagtgctcccctgatgagattatggcttatgcccagaaaatatttaagattttggatgaggagagagacaaggtgctcacgcacattgatcacatatttatggatatcctcactacatgtgtggaaacaatgtgtaatgagtacaaggtcactagtgacgcttgtatgatgaccatgtacgggggcatctctctcttaagtgagttctgtcgggtgctgtgctgctatgtcttagaggagactagtgtgatgctggccaagcggcctctgataaccaagcctgaggttatcagtgtaatgaagcgccgcattgaggagatctgcatgaaggtctttgcccagtacattctgggggccgatcctctgagagtctgctctcctagtgtggatgacctacgggccatcgccgaggagtcagatgaggaagaggctattgtagcctacactttggccaccgctggtgtcagctcctctgattctctggtgtcacccccagagtcccctgtacccgcgactatccctctgtcctcagtaattgtggctgagaacagtgatcaggaagaaagtgagcagagtgatgaggaagaggaggagggtgctcaggaggagcgggaggacactgtgtctgtcaagtctgagccagtgtctgagatagaggaagttgccccagaggaagaggaggatggtgctgaggaacccaccgcctctggaggcaagagcacccaccctatggtgactagaagcaaggctgaccagtaaactattgtatatatatatcagttactgttatggatcccacgtcactattgtatactctatattatactctatgttatactctgtaatcctactcaataaacgtgtcacgcctgtgaaaccgtactaagtctcccgtgtcttcttatcaccatcaggtgacatcctcgcccaggctgtcaatcatgccggtatcgattccagtagcaccggccccacgctgacaacccactcttgcagcgttagcagcgcccctcttaacaagccgacccccaccagcgtcgcggttactaacactcctctccccggggcatccgctactcccgagctcagcccgcgtaagaaaccgcgcaaaaccacgcgtcctttcaaggtgattattaaaccgcccgtgcctcccgcgcctatcatgctgcccctcatcaaacaggaagacatcaagcccgagcccgactttaccatccagtaccgcaacaagattatcgataccgccggctgtatcgtgatctctgatagcgaggaagaacagggtgaagaagtcgaaacccgcggtgctaccgcgtcttccccttccaccggcagcggcacgccgcgagtgacctctcccacgcacccgctctcccagatgaaccaccctcctcttcccgatcccttgggccggcccgatgaagatagttcctcttcgtcttcctcctcctgcagttcggcttcggactcggagagtgagtccgaggagatgaaatgcagcagtggcggaggagcatccgtgacctcgagccaccatgggcgcggcggttttggtggcgcggcctcctcctctctgctgagctgcggccatcagagcagcggcggggcgagcaccggaccccgcaagaagaagagcaaacgcatctccgagttggacaacgagaaggtgcgcaatatcatgaaagataagaacacccccttctgcacacccaacgtgcagactcggcggggtcgcgtcaagattgacgaggtgagccgcatgttccgcaacaccaatcgctctcttgagtacaagaacctgcccttcacgattcccagtatgcaccaggtgttagatgaggccatcaaagcctgcaaaaccatgcaggtgaacaacaagggcatccagattatctacacccgcaatcatgaggtgaagagtgaggtggatgcggtgcggtgtcgcctgggcaccatgtgcaacctggccctctccactcccttcctcatggagcacaccatgcccgtgacacatccacccgaagtggcgcagcgcacagccgatgcttgtaacgaaggcgtcaaggccgcgtggagcctcaaagaattgcacacccaccaattatgcccccgttcctccgattaccgcaacatgatcatccacgctgccacccccgtggacctgttgggcgctctcaacctgtgcctgcccctgatgcaaaagtttcccaaacaggtcatggtgcgcatcttctccaccaaccagggtgggttcatgctgcctatctacgagacggccgcgaaggcctacgccgtggggcagtttgagcagcccaccgagacccctcccgaagacctggacaccctgagcctggccatcgaggcagccatccaggacctgaggaacaagtctcagtaagtgaaaaactggaaagagagacatggactcttgtacatagtgattccccgtgacagtattaacgtgtggtgagaatgctgtttaataaaagtagctttttttatacatctccgtctctggtctcgtgatgtgggggtgcgggtggtcccggataattgtccttctccccctcatgtgtatggccctgatggcgagaggcacatacgggacttacatctgctcccccaacccagggagacttagaatctcttgcgccctctcggtgttggaccaaagactgtggtgggagatccagtattcatcgggtcgtctcacccgagtcctggtctttcatgatgacggtgaggagggtggtgacttacatctcacggatacccgtcactgcacttcctgtacacatccctatgtgatttctttggttaccccgctgaccatcaatgccacgctacggctgctgatacaagatgggatgtacgggcggggggagaaagagttgtgcatcgcccatctacccaccctgcgagacatccgcacctgccgcgtcgacgccgacctaggacttttgtacgccgtctgtctgatcctgtcgttcagcatcgtcgcggcggccctgtggaaggtagattacgacagatccgttgcggttgggcccaaaagctataaatcatagccactgacgcaggcacgtcattgacagccggcgacgtcgagagggtaactatgtaccgtgcgggggtgacgctgttagtggtggcggtggtaagtctgggaagatgggacgtggtaacgatggcggccgcgattggaatcgggtggtatgagcctgaagtaagcatggcttacatttatcaatacaatgacactaacttgactattttttgtaacactacagcttgcaattcgccctttttggcctcagggatgatgataagtgccccgttgaaaacacgctttctcaccagcaaggtcaactacagcaatgacatggataacgacagaaaaaattatacccaccaactgaaatacatgctagcgggggcaccgggaacttatgtgaatagcagcgtcacctgctggggctctaacgggacttttggcgccaagactttcttagtcaaatccatggtcaacaacacggatagtaacaccaatacgtcaatcatccactttgttcagcaggatgaactggtggataatcccgcgtactttaggcgtagcaatcaccgagcctttatgattgtcatactgacgcaagtggtttttgtggtcttcattattaacgcctcttttatctggagctggacgtttaggcgtcacaagaggtgacgcgacctcctgccacatatagctcgtccacacgccgtctcgtcacacggcaacatgtgttccgtactggcgatcgcgctcgtagttgcgctcttgggcgacatgcacccgggggtgaaaagtagcaccacaagcgccgtcacttcccctagtaataccaccgtcacgtctactacgtcaataagtacctctaacaacgtcacttctgctgtcaccaccacggtacaaacctctacctcgtccgcctccacttccgtgatagccacgacgcagaaagaggggcacctgtatactgtgaattgcgaagccagctacagccacgaccaagtgtctctaaacgccacctgcaaagttatcctgttgaataacaccaaaaatccagacattttatcagttacttgttatgcacggacagactgcaagggtcccttcactcaggtggggtatcttagcgccttcccccccgataatgaaggtaagtagcacctacctttctgttcaaccccttttcctcccccgccaacctgccaacaaaataaacaacttatgaattttatccacaggaaaactacatctctcctacaacgctactgctcaagagctgcttatctcgggactcaggccgcaggagaccactgagtacacgtgctctttcttcagctggggccgccatcacaacgccacttgggaccttttcacctatcccatctacgccgtgtacgggactcgcctgaacgccaccacgatgcgggtccgcgtgctgcttcaggaacacgaacactgcttgctcaacggtagcagcctctatcaccccaacagcaccgtgcatctgcatcagggcaaccagctcattccgccgtggaatattagtaacgtgacgtataacggacaacggttacgcgagtttgtcttctacctcaacggcacgtatactgtcgtgcgtctccacgttcagattgcgggccgaagttttaccaccacctacgtgtttatcaagagcgacccgctgttcgaggaccggctgctggcctacggcgtgctggctttcctggtgttcatggtgattattcttttgtacgtgacctacatgctggcgcgccggcgggactggtcctataagagactggaggagcccgttgaggaaaagaaacacccggtgccctacttcaagcagtggtagggcccgagacgagaggagtggctgctgtgttgtctttatttcgctgacttctacggagttttccctcagcctctgtgttcccaacacgtccccccgctgagcgttggcggcgatggtcatgttctcccaggaccacgtccagatcgtctacggctccacacgcatctgcaagtccctggccccggccaacaagagaaagacccatcgcaccatcgtggtagcgccgcgacggggttttttgcgtattcccccggacgggcaggacgtcaaccacgtcaagatcgtacccaccacctcctcctccctcgcgccgccccgtgacgacgagcggcggccgaccccgccgttgcggccgccgctcacagtctatccctatggcacgtcgctgatccgcaggtcagctagggacgcaaaactccgctccaagctaatcgtcttccatataactcgccccgcactcggtcagcacccgcagaatcccgggatctcgggccctgcggccatggatcacagtgagttcctcaccagctttcgtcgcgaggtcgatcggcaaaccgtactgaccgctgagagcgcgcccgccactgcggaagtctgtctgggcgacgctctgcccggcggcgtcatgggtggcggaggactgccggcgggtgtgggctcggcaagtgccgccgtggccgccgcggccgccgctgtggccggagtgcccgtcgccgcaaaccccgtcatgcccgccaccgccacggtcaccacgccgcccatgatcgaccttaccagccaccaccggccgctgacgctgtttacgccggcctccgcggccgctgcgcccgccgtggccaccaacggcggtaacgccacctacattttgccggccgactgtcggtacgcgccactttttgccagcaaatacaagtacgtcttcgaagaggtatcacgtctcatgcggctgcacgactccacggccgtgcagctgcagatcagcgcctcgtgcggcaacgctttccaggccctcaagagtgccctgctcaagttgcacaacgtcaccgtgttagcgggccagcagctcatcacgcagacgatgccgcacacgccacaggccgtagccacgttcaaattctttcaccaggatcccaaccgcgttctggactgcatccgtccggtggtgccgcgctctacttcgtaccacgagacgggtgtataccagatgtgggtctcgggcgccaccaagaaagacctgtttgacgccgtaaccctgtgcgcttccatcgtagaaaagcagccagacgtatttaatatcaacgtcagcttgttgacgtacccttcgatcgcggcgccccacttgccgctgtacaacgaattcaccagctttcgcctgcccacctcatgaagcggcggcggcgatggcggggctggttgcttttcccggccctgtgcttttgcttactgtgtgaagcggtggaaaccaacgcgaccaccgttaccagtaccaccgctgccgccgccacgacaaacactaccgtcgccaccaccggtaccactactacctcccctaacgtcacttcaaccacgagtaacaccgtcaccactcccaccacggtttcctcggtcagcaatctgacgtccagcaccacgtcgattcccatctcaacgtcaacggtttctggaacaagaaacacagggaataataataccacaaccatcggtacgaacgctacttccccctccccttctgtatccatacttaccaccgtgacaccggccgcaacttctaccatctccgtcgacggtgtcgtcacggcgtcagactacactccgacttttgacgatctggaaaacattaccaccacccgcgctcccacgcgtcctcccgcccaggacctgtgtagccataacctgtcaatcatcctgtacgaagaggaatctcagagcagcgtagacattgcggtggatgaagaagagccagaactggaggacgacgacgagtacgacgaactgtggttccccctctacttcgaggctgagtgcaaccgaaattacacgctacacgtcaatcacagttgtgattacagcgtgcgccagtcgtctgtctcattccccccgtggcgcgacatcgactcagttaccttcgtacccaggaacctctccaactgtagcgcccacggtctggccgtcatcgtcgcgggtaaccaaacctggtacgtgaatccgtttagcctggctcacctgctggatgcaatatataacgttttagggatcgaagacctgagcgccaactttcggcgccaactggctccttaccgtcacactctcatcgtgccgcagacttgatgtgccgccgcccggattgcggcttctctttctcacctggaccggtggtactgctgtggtgttgccttctgctgcccattgtttcctcagtcgccgtcagcgtcgctcctaccgccgccgagaaagtccccgcggagtgccccgaactaacgcgtcgatgcctgttgggtgaggtgtttcagggtgacaagtatgaaagttggctgcgcccgttggtgaatgttaccagacgcgatggcccgctatcgcaacttattcgttaccgtcccgttacgccggaggccgccaactccgtgctgttggacgatgctttcctggacactctggccctgctgtacaacaatccggatcaattgcgggccctgctgacgctgttgagctcggacacagcgccgcgctggatgacggtgatgcgcggctacagcgagtgcggcgatggctcgccggccgtgtacacgtgcgtggacgacctgtgccgcggctacgacctcacgcgactgtcatacgggcgcagcatcttcacggaacacgtgttaggcttcgagctggtgccaccgtctctctttaacgtggtggtggccatacgcaacgaagccacgcgtaccaaccgcgccgtgcgtctgcccgtgagcaccgctgccgcgcccgagggcatcacactcttttacggcctgtacaacgcagtgaaggaattctgcctgcgtcaccagctggacccgccgctactacgccacctagataaatactacgccggactgccgcccgagctgaagcagacgcgcgtcaacctgccggctcactcgcgctatggccctcaagcagtggatgctcgctaacattgctgataataaaggctctctgttaacccccgacgagcaggctcgcgtgttttgtctgagcgccgactggatccgcttcctcagcttgcccgaccacgacacggtgctgctgcgcgacacggtggcggcggtggagggcgcgcggcaactcgagatggtgtacccggcacccgagcacgtacaccgctggagctatctgtgtccgcccgagcaggtgcgcgtggtgatcgtgggccaggacccgtactgcgacggcagcgccagcggcctggccttcggcacgctggcgggccgaccgccgccgccctccctcaacaacgtgtttcgcgaactggcgcgtacggtggacgggtttcagcgtccggcctcgggttgcctggacgcctgggcgcgacgcggcgtgctgctgctcaacaccgtgttcaccgtggtgcacggacagcctggatctcaccgtcacttaggctggcagacgctgagtaaccatgtgatccggaggctgtcagagcgccgggagcatctggtgttcatgctgtggggcgccgacgcgcacacctgcgagtacctgatcgaccgacggcggcacttggtactcaagtcctgccacccgtcgccgcgcaacaccacccgcgccttcgtgggcaacgaccattttatactggccaacgcgtatctggacacgcattaccgagagaccatggactggcgactctgtgggtgattgatgataatagacacaccggggagacaaggtggtgaactgtgatgtctatctctttattgtaaaaaaaatcagtgaccaatatatatagacacacaccaaaaggggtggaaacccaaatgtccaagcgcgtcctgtttcatattttttccggtctcggctcggttttttaatcgtcgaaaaacgccgcgatcgaggcggcggcgatcgcagcctcctcgctgggatcgataatttcgagtccgtcctcgaggaacgagggccctcgccggcggccgttgccggcaacttgcgacaaccggagcagagggtcgttgtcctcctcgtcctcgtggcggttgtttctccgtcgcgatctccgagaggaggaggacgacgacgatgcagcctgccgccggctgtttctaccaccgccaccaccgccgcctcctcgagtattgttccgggcccgaccccgacgtccgcccgacggtggtggcggcggcggcagtggagccgaagaagacgaggaagagttactggcagccgcggcggtggcgacaacggggtttaccacgtagggcttgatttcacacacgggccggggaggagcagctggtgtttcgattgcggcggcaacgggcgcgacaccggcgacggaacctgagggtacaacaccggtggtgacgagtggcggacatgcggctgctggggggccaacgccggctgcggagacagctgcggcggtcctcgcgacgctgctgtggttgacgacgacagtcccgcccgacgtctctggcaagagtctgctggaaaccagggggagatcgcacaatcttttctccttacaatcattgagcattttggtcaatgactgtataatgtcatcaaaacgcggactgcgaggaggctgaggcgccgcggattcctgcgaattcggaggaacacggcagttagagactggagtggtggaatcattctcctcctccgactgcggtggtgcctccgccgcctcagccggagccctcctcatcctcctcatcatcattaaccccgcagccgccgccgtcgccgccgcctcggactcctgcaccgtctcgcccgcgctgtgggcgctgctgggtcgagggagcgaaagaagtgacgacggcgacgtcgacgacggcgacgaaaccaccgctccgcgctcaatgggtagaagtaacgcaccgtcggtgccggcggccacgtccgtcacggcgttatggtggtgatgatggtggtggtggttgttggaggaagaagagaccgcggaggatgaggacgagtaattgagaaaggccaccgcttcagacgtgtccagcggcagcgacatgcggccgctgccgccgccaccaccaccgccagcaccaccggactgctgctccgtctcgttcttgccgccgccgccatggccttcgtgctgtgcggtggtcttttgtctcttcgcctcccggaggggaggagagcctacagacgggacgacacatagcgcacgaaaaagcacatggttatcatccacacaaccaccagcgcaccaacaccgctcgcctgctcgctcgtgcgctacgggaggctcacgagtccactcggaaagcaccgtgacgcgaggagggccgggactcaccgtcgttctcggaggagggaggcggccgccgctccttctgccggttcatcaaccggggatcccgcagcagtccgttggcggagtccgaggagtgctgaccgccgctcccgccgccgccaccgccaccaccagcgccgccgcctccaccaccaccggcagacgaggacgactttttgcgccgttcttcgtgacgctgttcctgccttcgccgttgctgttcctccgcagaagggccgtcgcgagtcccgccgctgccacccagcgaggacacgcagacggcggaagcggtagacgcggcgccgcaaccaccgcctccgctggaggattcgccgtggtttttcaggtaatgccgcacgtaagtcacttgcaaattaccgttctcggaaatcatggtgagcagcgcgctctcattgggtccgctggagcccaccaccgaggagacggatttgttgaagacgataccgccgcgtacaaagaggtgctcctgcagctccccgtcgcccgtaatgtcaatagacatgaagccctgctgcgtcttggcgccggccgaagcctcgccgtgctgcataatggtagcgcagagccagcccttgttgaggtgcagcaccttgccatcgccgtccacgcagttgaccagacgcgcggtatcgaagacgaactggcgcacgtcgaaagtctgattgacgctttgatgcaggatgcgattaggattcgcaaaagtccagtattttcgcacgacggtagtagggagatccatgacgcggcggcgcaaagcgcgagcgcaacgctcgtcggaggccgtggagcgagtgccgccgcagccggcagagcgccgaaccccgtcgcagactctatttatacatcatctttccagcccgcctagcaacacccacaaacaacgtcacgacgcaacgtggttaaacagtacgtttattaaagtaactgggtgaacgacaccggagcggactgcaaatcgcaacgctactttctcgagtgcagatactcttcgagacggctaaacaacgtgtccaactcgctgagacctttccgcgtgccgttatccgatttcctttccgcctcctgagacagccgactaatcacggacttatctccgcaacctaacagaggctgggagcccgacaaaagtaaaacagcgtgctatgaacacgttgttacctctgtgcggacagcgccgccacagagacacttacacattgccgcatgtctttgtagatggattctagcgtcgagcgcatactatgcaattccgtcttgagtccgggatagacgtggtcgcctgcgggaaacacgatctccagataccgcctcaacaaccagtccatgacgctgcatccccaacagcctttgaccaccgtaccgtcgagccacacggagtagtcgtcctcacgttgctacaagaggaaaactacgtcacccgacacgcggaaaagaaagaccgtcgcaataaaccgtacctacgtgacctaccaacgtaggttttactcgatgaaaggtgacgcggagatcttgcaatctggtcgcgtaatcctctggacgacactgcggctttgtattctttatcgtcgtcgtcgccggcttcgcctcctcggaagcgcctagaagaaagacgatcaggaccagagaggaagagaccatcaccgacagcatcgccgcagcatgccgtcccagtccgccgcccaactgcgcgtcccaggtaggtggtcctttatgttatgatgtttttgtcaattttttttttcaatttctttcttccgcggttagaatagtttctgtaggaaccaattatcaatctgacgggttatcgtcaccacttgatggcaaaacgaaattttttttttcattgccttgaagtctctcccgccaccaccaccaccgccgttgtctccggctggagatcaagacgaaattcctcctctctaaaaaaaaaggtggtgggcttaattgatcatggcaagaagaaaaactatactgaataaactgtgtgcaaaactactagtaacaacaaaaatagcgactagatacaccacggacaatctcagcagatactctctcaaaagaaaaaaaagacgccgtaacgtcggagaatctggtatctactgcctgacgaatttttttttcgtccatgtatgtgattacgagtagtagtggtatgtagaacaagaagaaaaatcgtagtccccaaaaggataataaaaataacactcatagagaatcacagattttctctagacaactctctatccaaataacgaatgtgaagcgtacaaagtaagatattcaaagaatagcaccttcatagattcatttcagctttctactccttgtaatttaaagttgcactaaacaaagctcttaaagaaggttcgagccgctctcgatcactcatcgatcacgcgagtcttattattccaccacaacgtaacattcttcactttgtagagacactttatcgtagagtaaccctcgatttcctagctgttgttttttgattattttgttcgctctaagagagatactcgaaatcctacttacaccaaggaccctacatcatcgcaggaagaataaacataccgtagaaatctcgacacgcaaacgcgaatgtacacgaaccaaaagccacagacccactatttctgtgccgtattcttttttgacaatctgtctgaatctgcggaaatagttacggagaagcaattctgttaaaaaattcagtacgttagcagcaaaagataatcatttcgtgtgatagcaagtaaatcacctcacttaggatcgatttcgtgcgaaaaaattattttttctcctaatcaacagataatatggttaccatttagagtagtgtcactttactttcacggaagatgcaacccccgagaaaaagaagaatcgatcatagataaaagaaatcaagccagacttgttaagaaaaaaaaaagatcaaaaaattactacctaaaaagaacgcctagccattgggagacgcgcacgtctgtgtggtctccgcgatcatgagaacgaaaaaaaaagacacgacaatacacaggctgacctttgaaaaccaagcctattgataataatctaccccatagaacaggatataatcaagcatccaaacaacaaacagcgccgccgtgcctcctccagaggacggtgacgacgtatgtctgtcgtctcccttctcgctctggcttctggggctctcctcctctccccatcatcttctccttcgtcccagacggacggctatcggttcgcgcgctcgtcttttcttcgatgtgcgcaggtttcgtcatcggagaagaagaccgcgaccgtatcataatgatgataataataatacattcaccgaccatctttatcctcttttgttgttccaaagagaaaagaaaaaaaaaacaagcagccactctaaccatcacactcacgagttaatatggggttaggggggaggaagagaaataccgccatgaaggcaagagcagcagcagcaacgacgtcactacgatgattgatgatgatacacgactaccactggaggagaggaaaacggagaaaactcatcgtgatgatggaaacaagaatgatgataataatgatgacgataaagccaccacacgatatatacagagaacaacaaaaccaccacgacgatgaaacaaaacgctcaaccaaacattgtgtaaccgctacgcatccgtggccgcggccggcggcctcttgttttcgttgtccccttcgcgggggacatcatcgccgccgacccgcgtgtgccctgcctcacggctggtccgtgatgaactcttgctcgtaaccgccaagcgataaacaagccaccgtgatagaagacaccttataggaccatatcctagttacatagtagtgcatatatatagtaatagtagaataagtgaactttagacacgatagatgaagccatagtctgaatagtcatgatgttaggaacactatacgactagtacatacatacatacacccccttaggaggaacgatgaatcaaagaataatacatcatgtagcataagtacattaagcctttaaacgaacaaattgttaaccaaaatcgatcaccaccatagacgtactatcatcattacaacgaaaaactagacggatggatagctgtaagtctcacctagctaactaacgatcacattttttctccacgatatagtcaccacaaccatgaatgatagccgcctatttgaagtttgatatctcgacgaatctctatagtcatagcccgttctttttttccaagtatcctttagtccataagcattattataaccgtattacccagaaatctttgttatgagtctcttcgctgtcaactgattagtagcaagttgctgtgattttttttccaatcccataggcatccttagttaaaacattaagaagtaagtaggttctggatagctaatcatctttttttttttacttcggtagattaaaacaaatgaaacacgtagctgttgttttttggtgaatatagtttggtaagtccttagcgggtaagttctaagaaacattagttactttttattgttctgtctcctctccccctaccttacgttgggaggtagcttcgtcatgtaggataataattaggtaagcaaacaacatagatagtgattttagtatagataactcgtgtaagtgttttagtgacttgtaactcgactcggtagacttctcagagtttcgcctcacacaggcgggtacactcgttaagaaacgcaaaatacctaaaagggtacgttacatagcagataagttgatagatgaccgatattatacttcattaactcacgaagatgactgtaagtaaggatattgttgttcatgatagtagccaggttataaggatcatatatatctcgtcagggaaatacaagttagaccataatgttgactactttagagataataagacaccataggattctgaatttaccatgatataagttaagaagattgatatctgtcctttttttgaaacgaagataggcctttttattttttcgaattcatgttcgaaaacacaagcttccataacaagaacccgtaccgaagaaaagttccatcgactaaaaagaaaaaagaaaacgaagcaagacctcgacgacaacaacacatcaaagaaagacgaccagctgattatgttcttaggaattccacacacccgcgagccgatccgcaaacgtcgtgcgaggcgcgctttctctggctcgacacaatgatcacaccgcacgctatagacacgtcgtcgtggacgacgatgacctcaggccacgaatgacaaccaacatgggcaaagtccaattagccaaaaagacgacgattctaagaattgatgaatcctcgatatacgcctatcgataggtttcaattgtgtcatatacatcaaatgaaaaacaggacgcacgataaaagcttccttacagcataactgtaacatacgatcatcgaacatctcctcacatacctttctcctctcacataggaaaacaaaactcttttttttctttcctgtcaaggaaaaaatcaatgtaccaccacatcactttctgctcggtcccggcgacggatgggcgcgcacgcggacaaagacccaccggccacttccacttattttttgttgttaatcgtcttctcccccgcacgcggagcaccaccaagcctagctgctcattcgctcaaccagtcacaccgcgcacgcgagaaggggccggggtccgcgggcaccgccgccggaggcgcggttccctctctctaattccctggaaaacaagtaatgacaaacaaaaagacgacaaaaggtctctattctgctacatgagagaaattatagctgttggcaatttttcaaaatacatgttataaggcatcctctctgccacacgcgcagtcacggataggatcagtgcgtattcattataaaaaaaaacacaaacaacccatatatgtgaagcagaatgatgaccgaccgcacggagcgacgccgtcgactgacccacgcggcatgtacgccgtccgcgaacaaccaaaggacgacccgtctccccccgcacccgggttttttctcttggtcgaacccggcttgcgacgacgggttgttcctttaccggacgacggtcagccgcggggttgatacccagcgacggcgtcgctcccacccgggtttcttctcttgcaggtaccacccgtcgactgtcagcctcgcgaggagacaccgcggaccggggaaacggataagtttacgaacagaaatctcaaaagacgctgacccgataagtaccgtcacggagacacggtggtttttattgaatttccagtgtatcgagccaccgtgatgcaggtacggtggttttatgtaaagtgccgctatctataggcgatgtgttccctgacggtgtgtgtttttttggggatagacaacgtggttcttgtacgtggtttttaccctgctcaataaagtcacgttttccttacacggtgttgtgtcaaaaaataagcgtggtgcgtttgtctttgagcgcgcgacagatatagggggtgatagcggtgttcttctcatagggcagtcgcaacgggttaacgttcatcatgaggtgttcggggtccgtgactcgcgacatggccacgtagatgtggctcatcttgaggttcttgggatggtccccaaagtccacggccaccttctcgagcgacaggccctgactcttggcgatggtcatggccgtgcgcgaagtgaggccgtagtccacggtggtgcacacgtgcagactcttgccctgcgccgactcgacgaagcgcgaaacgttaacgtcgagcacaaagaggaacccaagcgcatcgcgtagcaccagccgcgaaaggccgcgctgcaccacctcggggtggatgcggtggcggtcactgggcagactgagcacgttgtcgctggtgtagccctcgagcgtgtacgtctgcgccggcgacacatgcgaaagcatgcccacgaaggagccggtctgcgagctgatctgacagttggccttgaacaccacgttacggcgattgtaggtaacgagcggcaacgtggcgaagcgaccgcccgtgagacgctgcatgagctggtagcgcttgagaaaaatgtcgcggaaggtagtgtacatgtgcaccgtctcctcgaaagaaagcagcgccaggctgggtggcttgacgtatttgagaaaaaagggatccgcgtacagactggtgtgatccatgagttcggcgtccgtgatggcgtccgagtcgtcatggtggttggacaggcaggggatgtcgtgggtctcctcttggccatgttccatccgttgagataccggcacgctctggccgccctgagaagaatccgcgtcgacgtgattatttatcggattctctcccccgctccaagcgggagcggcggccgtggcggcggcagcggcgcagagcgaactcacgtcgggcagctcaacgcgcgccagctcacgcaacatctcctcggtcgtgtagggcgacacgtagaagtagtacatggccgagaagagcaggcccgaaactaacgagtaggcgtaggccgcctgctcgcagggcgtgcgttcgataaacgtgtccttttgcaagatgtccacgaaacgttcgaccgtgccctggtatccgataacacaggcccgcaccttagagttgactcccaccgaactgcccttgatgtaggtaatgcgcaaggtgagcagcgtctcacggctatcgggcgcagtggtggtatcatcgtcctggaaaaacgccgtctcgtcgttgccgccggtgctcccgattacagatcctccccctccgtgagcctggacggaggagttgttggtggcaacgacgtcggccgcggggcgcagcgcctccttggtgatctcgctggagaggttgtggtcgacaaactgcgagtagttaatgatgcgcgccaagttctggcggaaccagagctcgacgggctgcggcgagtcgcccagcgggtcggccagctcgcagagctcctggtacgcgcggttgttgaccacgcagtagacgggcagatcaaagagacggtggcgctcgctcaggcggatctgctcgtgcagccgcttgaagtaagcctgcacctcgacgtgtgagagaaaaagccgcgtcatctcggcggcgtacgaggggttgcggatggagctgggcggccgcacgaagcgatccacgtaggccacgtgctcctccttgagcgggataccgaactccatgtacttgagcaggtcgccaaagtccaggtcggtgcaacgcttgttgtgaataaacatgacccagttgtcggcgatgtcgcagtagttgatgagcacctcgttctgaatcagcgccgagagcacgtcaacgcccttgcgcacgctcttgttttgcgtgtagtggtcgtagcggctctccagcgcctcggtctgcgtgggcgaaccgacgcagatgatgcagggcacgcggcgttcgcggtaaagtcgcgtgtcgcccagggcgttgtaaaagtagtaaaaaaacaccaccacctgcagcatgtagcgcagcataaggccgcactcgtcgatgacgatgatattgctctcgcacagctccgagaggtcctcgcaggcggcggctgcggccgcggcggaggccgaagcggccttgcgctcccacatatttaagcatttgtccacgatgtcggcgatgaccggccagtaggcgagcagatcgttgatctgcaggcgctggatggtggtctcctcgtgcggctcgcacacgcggtagcgttccagcgtctcgtggctaacggcgctgtcagccagcggcacgtgcttgctgacgaagccgaagacgcggtagatggtcttgacctgcgccgagcgagtgcggttgaggatcgcgctgaggttctgcgcggcgatcaccgtggtaccggtgatcacgcaatctagattggccgccagcacctggatgctggaagtcttgccggcgcccgccgtgccggtgacgagcagcgcgcggaagggaaagaagggccaacggtcgacgcagggcacgcgcgtgccgccggcctcggacgaagcggcagcggcggcagaagaggaggcggaggagtgaacggtcgtcgttgccgcggcggtagttgcggcagaggggttgttatctgtcgttcgttcaacgcgactgatggagcgaaaccactggaacgaaaaatcctcgggcgcaaagcgctcgcgcgagagggacttgaccttgtcgacgatccgttcgatcttggcggccgacgagaggttgaggatcaaggcgtcgtcgtacttgggcgtgggccgcggcgtggatgacgaggccgtcatcgacattttccccacggggcagacgatgagcttcctgcggttgctgcacggctttctggggacgtgtcgcggccaaagcatgcaccaggtgctgcgcgacccgtgcgtgctgcgcaagcagctgctctacggagtgtgcaaaacgctctttgacaccatcacggtgcggcgcgtggccgaggagtggaagttgcacgcggcgctatttccctaccgcgcgctggacgaagaggacctggagcagtatctgttggtgtggagcgcctcgttgcgccagagcgtgcaaacgggcgtgctgggcgcgctccgcgacattttatatcagtacgccgataacgacgactatggtctctacgtggattggtgcgtaacggtgggactggtaccgctgctggacgtgaagaccaagccgagcgaggcggccgagcgggcgcaatttgtacgcgcggccgtgcagcgggccaccgagacacacccgctggcgcaggacctgctgcaggctaacctggcgctgctgctgcaggtggccgagcgcctgggcgccgtgcgcgtagccaacgcgcccgaggtacgcgtcttcaagaaggtgcgctcggagcggctggaggcgcagctgcgcggcaagcacatccgcttgtacgtggcggccgaaccgctggcttatgagcgcgacaagctgctgttcaccacgccggtggcacacctgcacgaggagattctgcgctacgacgggctctgccgccaccaaaagatctgccagttgctcaatacctttcctgtgaaagtggtgaccgccagccgccacgagctcaactgcaagaagctggtggagatgatggagcagcacgaccggggcagcgacgccaaaaagtccattatgaagtttttgcttaacgtctcggacagcaaatcgcgcatcggcatcgaggacagcgtcgagtcctttctgcaggacctgaccccctcgctggtggaccaaaaccgtctactacccgcgcgtggtccgggcggacccggcgtggtgggacccggcggcgccgtggtgggaggacccgcgggccacgtcgggctgctgccgccgccacccggcccggcggcgcccgagcgggacatccgcgacctgtttaagaagcaggttatcaagtgcctggaggagcagatccagtcgcaggtggacgagatccaggacctgcgcacgcttaaccagacctgggagaatcgcgtgcgcgaactgcgcgacctgctcacgcgctacgcctcgcggcgcgaggactccatgagcctgggcgcgcgcgacgccgaactctaccacctgcccgtgttggaggccgtgcgcaaggcgcgcgacgcggcgcccttccgtccgctggcggtggaagacaaccgcctggtggccaacagcttcttctcgcagttcgtgcccggcaccgagtcgctggaacgcttcctcacgcagttgtgggaaaacgagtatttccgtacctttcgcctacggcgtctggtcacgcatcaaggggccgaagaggccatcgtctactccaattacacggtagagcgcgtgaccctgccctatctgtgtcacatcctggcgctgggcacgctggaccccgtacccgaggcctacctgcagctctccttcggcgagatcgtggccgccgcctacgacgacagcaagttttgccgatacgtggagctgatttgcagccgcgagaaggcgcgtcggcgccaaatgagccgcgaagcggcgggcggagtgccagaaaggggaactgcctcgagcggcggcccaggaacacttgaaaggtccgcgccgcgccgcttgatcacggcagacgaggagcggcgcggcccagagcgtgtcggccgatttcgaaatggaggccctgatgatccgcggcgtgctggaggtccatacggatttcactagacagaatgtgatgatcatggagccgcaagtgctcgactttacggtgcgcggcgacaagctgtggctgcacacggagcacgggctgctggtctccatggccgagtaccgcagcgagttgctgtgcacctcggcctttctaggctactccgccgtgtttttgctcgagaccgaagacgccgtcacgcaggtgaggctctcggatctgcggctcaaacaccgctgcggcatcgtcaaagccgacaacctgctgcacttcgcgctctgtaccgttatttcgtgcgtggaaaattgcaacttaacgcgcaagtgcctgcacgacctgctccagtacctggacgcggtgaacgtgcgcgaaagcttcggccggctgctgcaccacagcgccaggcggctgatctgcagcgcgctctacctgctctttgaggaaaaagagccgcacattgtgcagtacgtgcccgctaccttcgtgctcttccagcagacgcggcatacctgcctgcagctggtagcacgcttctttttccgccttaccggtcaggacgaggcacactcgttcagcctcaagctgaccgagcgcaagaccgtggacggttggcccgtgggcctgggcctgctagacgtgctcaacgccaactaccccaatttgccctcaccccccaagctgccgccgcgctgggaacgaggagaggaagagtgagaagcgaactagacacgcatatcatagaaaaaaaaaaaacacgcaacacgtagtgagctttgacgtcccttttactagtatccacgtcacacgctaagagctttgacgcactttttttactagtatccacgtcacttacccacgtagttcccctacgtgactcgttaagcgttgagccggaaaaaccgcaggccctcggaagccacccgcttagcagcgtgttgcgcgtcaaccgccagcgagcgcacccactcgtcgcgctcctcgagccaagtcgccgacgaagaagaacaagacggaggagacaccgtcgccgtgcccgaagaggacgaagtgacggacggcaaggcggaggagagaacggaagaagaagaacaagcggtggtggaagcggtggaggacgacaataactctcgcgcccagacctccacgcaagccgtgagcatggcaaaggccttgtccacatagacgccgtagccgatatcggccgccaacgccgtatcgcgtgactgtacgatgatctggccctgctcggcccacacgccgtggaagggcgcgcagtcaatcaccccagcgtgcggccttacttcgttttcaccgggctggaagcgcagtaaccaaaagtccacgtcgttgcggcgagccacgaaacgaaagaggatctcgcggtacacggcttccagctcggacacgctcacgcgctcccgtaacagcgccggcagccggcccaggacatgacccacggccgagagccagtcgccaccggctgcgcagcaacagccacctaacgccgcgggcggcgtggagggagaaacccgatcactaccgccgttatgaccactcccggcagcggcatctagaccgccgccactcgcgtggtccgcgtcgcccacgccactaccaccgccgccgctagaatggcggtgagtgacgacgcagcccgcgcaacaagcgccaccgcaatgtcccgccgcgaaaccacccaccaccccgtggagcggactaccaccggcgccgccgttgccgtagaagaagttgaagggacccaccaaccgctcgtcgccccagaccaacagcacgccgggcgcgctctcttgaacacgacaggtgggacccggatcgtcgccgccaaaaagtttgcgccaataacagtcgaccacagtccgcacgcacacttcggccgagacgggtccgtgacccgaatagccgtcgtagacataaaactcgcggtggccgcgcgacagaacccacaaaaggccggccgaagcgcaggctgacgtaacgtgctcggagatgtagcccagcagactctggatctgccagaaagcgcgtcgcgagcgaaaacgcagattctcaataaacttttcacaaaccgcataagtgtggagtcgatgactataacgcacgtagggattgaagtcgcgcgcgcgtacacacttggccagcacgcgctcgaccaaatccacgatgagcactcgatgtagcgtggcgtcgcgaacgtgcacggtgaaagtggcgtcgtcgctcggcgggtgcgcaccgccggtgctgctgctgacttccacgacgttgttttcaccgtcgccgtcgtcacgtggcagcggcggcaacagccagcgacgatcgccgccggccggtcgctcgcgaaaagccgtggcattgagacgcacggcgccgccgccggcctcggtaccgaagacctgccactcatcctcgggcacgccgagcgagagcgcgcagggttccacctccagcttgccggccgagcccacgatgtcgggcaggccgcaccacgagagcacctcagccgccgcgtccaacgccgtctcgcgcattaacgtgtgcagaccgtggaccgcgtagacgggcacgggcgggaaaccgggaaaaaagaaagaacgggcggcgcccgtctcaaagaggtccggccccaggtagtcgcgtagcggcggctgcccagcgaaaccacggaaaagcacgtcgtaaaggtgagtccaggccgactgcagcaataaacaacactgctcgtcggtcactgccacggccacgaaaccgacaggcgtgaccagacgcagacaggtgcgcaaaaaacacacctcgcgcacctcaaagaggcgtgccaggacggcctcgtcgtcgcgctccagcacatacttgtgagtgccgacgcgaaacgacatggccaaatcgtaggcgtagtaaccgcgacgcaattttttgtgcgcgtgggtgccatactcttcggagacgcgttccgcggtatgcgtgaccacacgcggctcgtgcacttcgggatacgagccgatgaccactagcttggctacgtggaaaagactaagcgcgttcgacagcgctgcggtttccacgcccagtgccggtgcggcctccaaaatctccacgccactagcgtccgtctgaatctgcaccggcgtgaaggtgcgcgccaacacgcggattaacgcgctgccttctagcaacacgcgcgccaacacggcgctacgctgctctaggccgcgccgacgctcatcggcgtccgtagtcacggccgaggccagcgcagcgtagctggcgcgatgcacagcacgcacctcagccggcggtagacggtcaccgcgcaccacgaacgtgtgaagccgcggctcggcacggccgccacccagatccaaaaacagacattgtacgataggcaccgaggcctctagaaggccgtaccagctgagatgacagctggtcccgaacagggtgtacgggtggtggcggtggtgcagcggcggctgagcggtcatcctcggacagaagagagtcgcgaaggcccgcggggtcttttttcaccgaccgcccggacgtgctcaaaccgcgtcgtgagccgcggcggctcccatcgtagtatttaacgacccgcgagcctgtcgtcatcggcgcgcccccatcgcctcccgagcgagcgggccgccgctatcgccatggccccctcgcacgtggataaggtgaatacacggacatggagcgcttctatcgttttcatggtgctgacttttgtcaacgtcagcgtgcatctagtgctgagcaattttccgcacctgggctacccctgcgtctactatcacgtcgtggactttgaaaggctcaacatgtcggcctacaacgtaatgcacctgcacacgcctatgcttttcttagactcggtgcagttggtgtgctacgccgtgttcatgcagctcgtctttttagccgtgaccatctactacctggtatgctggatcaagatcagcatgcgcaaggacaaaggcatgagcctaaaccagtcgacacgcgacatttcgtacatgggcgacagcctcacagccttcctcttcattctcagcatggacacgttccaactattcacactgaccatgtcatttcggctgcccagcatgatcgccttcatggccgccgtgcactttttctgcctgaccattttcaacgtgagcatggtcacgcagtaccgcagctacaaacgctcactctttttcttctcgcgtctgcaccccaagctcaaaggtacggtgcagttccgcacgctcatcgtcaacctggtagaggtagcgcttggtttcaacaccaccgtggtagccatggccctgtgctacggcttcggaaacaactttttcgtgcgtacaggccacatggtgttagccgtcttcgtggtctacgctatcatctccatcatctactttttactgatcgaggccgtcttttttcaatacgtcaaggtgcaattcggctaccacctgggcgccttctttggactctgcggcctcatctaccccatcgtgcagtacgataccttcctcagcaacgaataccgcaccggcatcagctggtcgttcggcatgctctttttcatatgggccatgtttacgacgtgtcgcgccgtccgctactttcgcggacgcggtagcggcagtgtcaagtaccaggcgctggccacagcctccggcgaagaagtcgctgtgctcagtcaccacgacagcttggaaagccgtcgcctccgcgaagaagaggacgacgacgatgatgaagacttcgaggacgcttaaccccgccgccacccgcaccagacttggagacatggacataaaaaagagacacgcagaccgtgggtcgggagcacatacttttttttttattaaaggtttatctgttcttccaccagctactttacgtgtttcaaacagcacattagacacacgggggcgcaaacacacacaaaaaaaaaataatatacacacggagaaacacccacgggtgtcccattcccgactcgcgaatcgtacgcgagacctgaaagtttatgagttaagagggcaaggaggcggcgggcttttttgtcccgggggtgggtggacgttgtgaaatcttcttttggcgcggagtcctgggtgtgtcgggccgcggcagtcgcttagccaccacctggacgggggggaccgggggcggggacaggtaaattgaggtgtcctcttcgtctaggtcgtccgtctcctgcataatggagctttgctgatggtggtgatgttttgagggtttctttttcttttttgactgcttgctcggtttcggagccttgtcctcgcgaaacgtcgagcgcaccgcgtttttcttggagccgtcgtgggtggcctcgcggtggctgccgctactactgtcgtttcccccgcagccactaccgcagagccgcagcttctgttgccgctcctcgttatcgtcatcctccccgtcgtcatcgtcctccccttcgtccgaggaggaagtcggagggatgttgtcgtaggagcgtagagacacctggcgacccagagcatctttcaggggctcaccgggcgtggtaccgaactcacaacatattcgtttgcagagttcggcacccatatcggtaggttcgtcttgcgggacaggtcgcgactccaacggtctagcacggtagagacggcatggcgcgtaaactgagggtcaaagaccacgggcgtgacgatgagcaggagcgggatgtggtcgcagtggaaaacgcgaccgccggccagcaactcgcagcccagttcgctttcctcgcgctcgcggaagatggccgagaccaggtagacggtaggcaggtcgcggaaatcgatccgctccgggtccggatgcttctttatatagtattggctgagcacgtactgctgaatgagcatctgaaagtaatactggtgacgcggattgacaaaagccggcagtgaaaagcgcgctacctcgtacacgttgagccggcccagcagctcgggcgtgttttcgtcctcgaaaggtatcggcggcggcgaatcgcccgggctgccccgcaggtggtgatcagcgccgccgccagcggcgtcgcccgcggctaggccgagactcgcgttaatagtgatcgtggcgtccccgtcgctgttgtcgtcactcaggtgcttggcgtcaaacacgatcacttccgaacactcggccttattgagatacagcagatcggccaggtactcgcgcagcggttcgggcggcttgagcgggcgcgcgcgcttgagcgtggccctgaagagcgccgcgtcgtgcgaaagcagaaactcgcgtgccgacggggtctcgcgttcaccgcgaaactccacgcccggcaccgggtgtgactgcaacagcgaggccacggccgccgcgtcgtgcctccgcagcacgttctgcacaaaggggtcctcctttttgcgcaaatatttgtagcggcacttgatctcgtagacgcgcgcacacggttccaccagcaaggtgcgaccgctaccctgcttgagcacgccgaagcacaggtccatggaagcgcccagcagccccgacgtggggtcgatgagcagaccgaggccgtcgcgcaccggctcgcgtccgtgcatcacgtaacattccaccagcgttttgactaagccctcgtgtttgataccgaactggatgcccggcgagacgccggcgcgcgaacccgtgtagtgcgagccgccgccacccgaaccgtccgccgccgcggcgcccggcagacagccgctgacgaaggcctcgtagaacttggtggccgagaccgtgtccatacgcaacagatgccacaccgagttgcgcgactgtccgcgcgattccttttccagcaactggaagagctcgacctgccgatagttgggcgctaaatccagcaaccggctgagccacacgtagtcgtccgagccgccgtgccggtcgtcgcaccgctcggccacgcgctccagggcctcggcgatctcggcgcgcgaagcttcggcggcgtgccgctgacccaaaatgtcgcgcagaccctcgtcgcgagccagcgcggccacgcgcgtcataaagtcctcggctactggcgtaccgtgggcccgcagcatcttggcgaagatgcggtaggcgtaagacagacgcagcaccgtaaagggcagattacggaagccctcctggtgcagcaaaaaggtgttcatgagaaacagactgaggggctcatcgtcccaaaccgccagcagccgggtgagctcctcatcgtcgtcgtagtccaaactcgagacgccccacatgatgatggcggcgcctcggtattttccccgccggtgggtttgtaccttctctgttgcctttcccctcagcaaccgtcacgttccgcgtcccggttactcggggaacagttggcggcagtcaccgtcaaggtcctcctcgcagattatgctggtggtgcgccgaaaggcgttatataaatacagcccgtcgctcgtggccaacagacgctccacgttctttctgacgtattcgtgcagcatggtctgcgagcattcgtggtagaagcggcgaaaggcgcgtacgcgacacgaggacatcttggcctccacaaagcgcagcgtgtgcgacaccagcgcggcgccatgctcgcccaggagacaggcgccgtagctcatttgcgccgccagaatgagcagacaggcgtcggagcagtgcgtgagcttaccgttctccaacgcgcggcaggccgcgccggcgtgcttaaagagcaacgcctccgtgcccatgcgcacctcgtccagaccgcgccggtccaacagccgcatgaggcaaaagcccagcacgttacccagcgccgacagctccgacatgcaataacgccgtaggccggctacggggaaacgcgcgtgcgggtcgcagatgagcagcttctgcagcggcatgggtcggaaagcagggtggtaacattcgcgcagacggtgcgagcagttggggatgcggcgcgccgtacccgtctcctgaaagacggccacacagcgctcgttgtaatccggatagggctcgctgaggctgtaatcgcacagcgcggcgcgcacgatctcgctggggttgtgcgggttcacgtcgatgagcacgttcatgggtgtaatgtcaaagtggcatacacgacactggtgattgagaaatttgatagcgtcggccaacgtgcaaaaggcacgtcggtagctgtcgatgcacgccagcttccactggtcgtgatgaaacatgtctgtgtggaaacgtcgatgtaccgtgacgttgtgcagcagacagcagcccgtggccgtgagcagaccgcggtgcacgcccgtgcccaccagcgacggcggctgctgttgctcgccagcggcgcgcgtgcggatcaggcccgacatccagaccgtgagcaccgtctcgctgtgcttacgcgccaccttgaccacgcgatagcgatcgagcggccagacctcgccgaaggagccctggcccaggcggtagctctcgtcgctcatgtccacggcataacaaatcttgtggcaaaaatcgtcctctttgggcacgtagaccagcaggtaggagatagagagctcgcagagctcgggatgcgtaaggcgcaagaacatacgcgggtcgcacgtaaggccgcggatggacgtggtgatgatctggtcgttggaacaggtgcaatgcacgtcgtcgtgtgacgtggagtcggcctccaccgccgtggcggattcctccccggaactaccgctgagcggctgcggaatgcggcccgggcccgatgccacggcgctgtcctgactttccgcgcgcagctccacgtcgttttcttcgagcaccgcgtccacaccgcccacacgacgtcggcacagcggggtgcgggccagcgacaccaacggcggacgcaacgggcgtttgcgtccaccgcggacgccgctcacgctgtccgaggggtcgctgccgccggtgaagagagcgcggcgtacgctggtcacgtcgccgtcgcgatcgtactcgaacgaccacatggccgaagtttcgcggcagcgcaagccgtggtaaccgtcgccgctggcggcgctgccgcgagacgacgtggacggcactacgggccgacgcaggttctccttgtccgaagccgcgtcctctttttctccgtcacgcatcacgtcacttcgaacgcatgcggaaaaagtcgcgtgtccaagcacggtggttgtgctgacggaactcagggtggtcaaagtggtgacgccgccgccggcctcgtcggccatcagatccacgacctcgttttcatcaacgtgagcctgggcgacctgagcggcggcggcctgcgcggcctgcaccgcggcttgagcggcggcctgcgcagcttcgcgcatccactggcgccggcgcgccctgctgggacgacgcaatggcggcggatcccagccctgagtcgtcgttccgagcgaggccgagcgagcccgagaccgaagtgcggaggacatagtggcgacagtcttccctgttcctaaggctgcactagctaccacaccgacactgtcgttatgttgtgtttttttttaataaaatctgaacagaggcgtgacggagattgctatacctgttagacggcgtcgtcgacctccaggtccaaatcgcacgtcgccgaaaccgagtccaccaaggtggctctcacatcgtctaccgtgtccttcagctcggttaaagagtccagcgcgtcgtccacgttaccggattgcagctgtcgggcgcgttgcaactcttgctgcacggccgcccgttgctccaacaggtgtgcggccacgcactgcgtcgttcgctgactgtatcgggtctgttcccgagcggccacacgcatcaccgtcaaagcctgctgcgtggtgagccggtgctgcggtccgtaggtacgccgcagaaactgatgctgctgtcgctcaaggtcgacgcgcatcacgtcctttaagagctgtttgttgaccgacgtcatagattcaacgtgatgagacccgcgtcgttcagcgagagagcgtccagcaacttgccgacgtggtagacggggaaaagcgagacggtgctctggccgggcaagatgtggctcaaagtgacgtcggtgacagccgcggcgcagtcttggataacgatggggctataactcacggtccgcgcctcgtcacgcgcgagatctaaacagagacggttctgactgtagagcgcgcacaacaaacaggtgcgcgacgaggccggccaggcgggcacctcgcgccccgagaagcggccgcgcaccgcctgcaacacctctctgagacggtccagcgagacgggctttaaaggcaaatgcacctcgtcgccggcgtcatcgacccggcctgctgacgcgctcgtctcgaccgcacaagcgccggccccgccgccgccaccactaccaccaccaccacccgccgtcgtcgcctgcggcgtcggcgcagggaattcgtagccgcgataccaaacaaagacgtacagctcagccagattcatgtaggtcatatagtcccgcacgggttcgtaaaagagtttgggcaacaacgcggggaaaggacaaccgttcttttcgcgaccgaaacaagtgtcacgcgcgcaaaagctgcgcggtccacagtacagcagccacagcagggcctccacgtcgcacacgttgtgatgatctaacaagcccggcgtgtacacctgtcgcagcacggcttccacgtgttgcaccttgttgctggagagtgacagctccacgtgagccttgcgatacaacaggtaactgccgtagattaattcgccgtcgtaggtaacacggtcagcattgcgtaacgcataatcacgcacacaaagcgacggcaaaggcttagccgcggccgcgaaacgctccagcacgtcgtgtcgacgtagaaaagacggcgtggcggcgtcgtttttcggagcgcgtcgtctacgacggcgtttggcccgagacccaccgccgttcttttcccccgcggttttattcccgacgtttttctttttgtcctccggcccgctatcgccaccgctgctactgctatccaacaccggcacctcggccgattcgcgcggaattacgttggtgaccaacaagaaattctcgtcgggcgtttcaattaggcgaaagcgatcgtaaggtgacacggcctcgcaggccaccagcgccatatttacggcctcctcgaagcgccaagcctcggagaccgagaaatcggcggccggagactgcgccgacagctcgaccatccgttccaccgagcacagggacgttgaaaccccggcggaccccggagacctgacggcagttgagggggaggagacggggaaactgagaggagaggcggaggaagattcgtccgagcctgacgccgaggaagacgacaccactagggacgacgaagacgaacgagtgacggcgcccgtcccacgagccacgtccgcaacaacgtggttttcgggtggatcctccgtcgtcctcgcggccgccatctttttcctctcctctcgccgctgccgcctaacctccgctcgcaccaccgccgccgccatcatgttgcgcggagactcggccgccaagatccaggagcgctacgcggagctgcagaagcgcaagagccaccccacctcctgcatctccacggccttcaccaatgtggcgacgctgtgccgcaagcgctaccagatgatgcaccccgaactcgggctggcccactcgtgcaacgaggccttcctgccgctcatggccttctgcggccgccaccgcgactacaactcgcccgaggaaagccagcgcgagctgctgtttcacgagcgcctcaagagcgcgctcgataaactgacgtttcgcccgtgctccgaggagcagcgcgcctcctaccagaagctggacgcgttgaccgagctctaccgcgatccgcagtttcagcagatcaacaacttcatgaccgactttaaaaagtggctcgacggcggcttcagtaccgccgtcgagggcgacgcaaaagccatccgactcgaaccgtttcaaaagaatttattgatacacgtcatcttttttatagccgtgaccaagatccccgtgctggccaatcgcgtgctgcagtacctcatccacgccttccagatcgacttcctctcgcagacctccatcgacatctttaagcagaaagccaccgtgttcctggtgccgcgacgtcacggcaagacttggttcatcatccccattatctcgtttctgcttaagcacatgatcggcatcagcatcggctacgtggcgcaccaaaagcacgtgtcgcagtttgtgctcaaagaggtcgagttccgctgccgccacaccttcgcgcgcgactacgtggtcgagaacaaggacaacgtgatcagcatcgaccaccgcggcgccaagagcacggcgctttttgccagttgctacaacaccaacgtgagtagctccatgatgataacatacgccttgccacaaaccgtggcgagtccatgtcctccttttttttgttgtttcttgtttcttctccccgtgaactgtcagaccccgttagtgcactaggttcttaagcaccggacaggaacacactatcatacgtgacacaggttcctctaccttgaccaggtcccacacatcggtcttgacgggcagccatcggccctcagaatccttaacaccgatgtgataatccaggccgtctcccagtgtgacctgcgccgcggtcttagaacctacggcgcataggtacttggcgtcatcgctctcacagaaaaaagtcgcgggttcctcgttgtggatgagcgactgcgtcatgggcccacagggcacgtaacaaagacagcggcccatatcgggggtgcaacccacgtaattgccagtgggatctacgtgtccctcgtgatccgtgcaaaagctgcaacccgcctgcccgcaggccgtggccgccgccatgaggcgcgtcatggaagggatatcgcaccgattgccgcatgaggtaaacaggtcgtaacacagaatgtaaaagaaaagcgtgtagccttcgggacgcggcagcaaccaggcgccggcgccgcctagcgtcactgccttctgacaggtcaggtccatggcaccgtgacccttgaccaggatacgcttggcttcatcctggggcaccaacatgcagacctcgtaaatcacgtcgggcgtaataccatcgcacgtcatactgctggtcacctggctaaagcttggcaagaaatcgatgctggctggacccaaaggacctccgaagctcagttggtacaaggtaggtagatgacagatgcgtcgacgacgccgatgtacgtggttcacgccatagtggccttgataacggccgttgcagcaaaaacagatgatccattcgccgtcgcggtagagcaacagcaactggcataagatacacgagctgtcgtcctccggactaaagatcgtcgaacggcaagcgacggcccgatactcgcggtgtttccggctcttgccgaccagcttccacatgcattcctcttgcaagaactgcttcaaagttctggaatcggtctcgcaaagcccgctgcgccaagccatgaagagtgacgcgcgaagagacggcaaagccgcccggcagcacccagtaaaagtccaagtctggcgtgacgtacagcacgcacacctcgggctgcgagagccaacgtcgcaggcgtccgcggcgatcacggacgatccaaagcccggtgcgaggacaacgcgccgcgcgcacttccacgcccaaatccacttgcgcgcgaacgcagcgcaccacgtcagcgtaccaagtctgttcggcgggcggaccgctctcgttccgcggcccgaaaagcagctcctgcggtttgggcgccgagcgctcgcgctggcgacgagctcgctgagcggcagcggcggcaccccggctcagacgaggcgttagcgtcttaataatacagctacgcacgtccgcccaatccatccagagcgccaaggcatgacggcaaagttcccaaacaacgcgccaggacatgttccgtgacacgtggcaggcgaaacgctgtggcaacgcgccgccgtcccgtcgtagtacagcgtagatctcgtcgcgcacggcgcgaatcagcacgtactcgacggcgatgcgcgcccgataagcgtccaacgcccggtatagttcgacttcgtggtcatcgtagctcagctcgcgactgcgccaaaaggaattgacgtaccacagcacacggaggcgcacgcgatgctgcacatcccagacctcgcgaagacgcgagacaccggcacccttccactcgtccgtacgcgcgacctcgtcgcggtcgtgcggatcggtggcgtacatgaggtctggatttacgtccaggcgcagctgcaccaactcatgaccgcgtatcttggaaggcggctccaatggacccgcgtgatagatgaattcctcgtcgccgcgcaacaaacgcgctacccgctgctccaggttactgaatctgccgtcgccgttcgcggaggaggttcctgctccgttcggaatttcaaaaaatggagtactgacggccgtctccagagaagccacagccgcttcgggcaaacggcgatccgacccattgtctaagttattacgcagtccgccccgccgacggtgattcgtggtcgtggccaactggtgctgccggtcgcgcttattcgcttccatttcttctcgtaacaggtcacgcgctaaaaactcccagtcacgatagctgccgtcgggccagaccagtctcaggtgtagcgtctgcgcgcctgagagccgattatcggggcagcgcagacccaacgtagtgaagacggcatagaacatgcgcacgcgctgctctttctctaacgtcacagtgagaccgctttgacgtaggtaatcgagcaactccagtgggcgcggtagtacacgaaaacaggcccgctgccaagtccgccgctcgcggtcaaaagcgcgatcgccgcccacggcgtcctcggcgtcgtcggaggccggtgcgtcgtcctcatctccgcctggagcgcggcccgtggatcggccagcgctgtctacattacgatagtagacgtagcgcagcgtctcggcctcctcgttactcaacacctcctggtcgagcaccaagtgtagaggcaattgctcatcgtcagcgaaccgcgcttcaaacgccagatccgaatacaggtgcgtttccatattcggaacgcatctgtttcagaagcgcgtcctcgcgcttcttacgactaaccttgatgacacacgcgtcgtacttggtctgctttgagtagataccgatgataagctgaataaaaagttggctgatgacgggcaccgaaatacggttgacgttatgcatagaacggaaaaccttattaaaggtgaagtaaatactgtcctccacctgctttttgaggcggtcgcgctcgaccacctcctggatcacgtcggcgtaacggccggcgtgcgtcatgaggtagctgtacacgccgctgagcacggcgctgatgatgttgacgtcgtccagtgcggcctcctcgatgggttccaacaggtggctacgcgccaccggatagagagcctcgtataccaggcccgtcttgacgcagacggagccctcgagcgtggagacgagcgcgcagccgctgcccagatcacacaggtgcgtgcgaaagcagcgcgtgcacgcgtagagcgagtgtaactggatctcctcggtaaacgcgttctggacgtgcctcatgtcacaggcgcccgaggcgtcgcacatgacgtctgagcgccgctgacagttttgggggcggagggaacaggagaagggcagggacgacaggtgttgcttgtctccgcgacgttcacgtccgggtgactgcaggcgtccaggatgtcgttaacgcactccaccgtcaggtgctcgaacacggacgcgaccagttccaagcggcgcgggcctgactcctcggcctggaaaaggaaggaaaagtgttgaaagaggcggtcgacaaagataaaaacatcctccgtagtggcgtgcgcgacccctagtcggttgagttccgccagcaacgagttcatggcggctgtggcgggtcgcgacgacgacactttcgtttttatgggcgcgcgtcacgcggcgccggtgtcggcggattggttccggttttcaggtcgcagcccggttggcacacggcgatcccgcctcacctggcggctcacctggctcacctgtccggccccaccccgactctgtaggcttccagtcgagcgtgcgtaatcataagagtcccttttctgtctcctctctacacagagcatccgaggacaaaacttccacttgctgctggtggacgaggcgcacttcatcaagaaagaggccttcaacaccattctggggttcctggcccagaataccaccaagatcatcttcatatcgtccaccaacactaccagtgactccacgtgtttcttgacgcgccttaacaatgcgccctttgacatgctcaacgtggtctcttacgtgtgcgaagagcacctgcacagcttcacggagaagggcgacgccacggcgtgtccttgctaccgactgcacaagcccaccttcatcagcctcaactcgcaagtgcgcaagacggccaacatgtttatgccgggcgctttcatggacgagatcatcggcggtaccaataaaatctcgcagaacaccgtgctcatcacggaccagagccgcgaagagttcgatattttgcgttacagcacgctcaacaccaacgcctacgattatttcggcaagacgctttacgtgtatctggacccggccttcaccaccaaccgcaaggcctcgggcacgggcgtggcggccgtaggcgcctaccgacaccagtttctcatttacggcctagagcatttctttttgcgcgacctctccgagagttctgaggtagccatcgccgagtgcgcggcgcacatgatcatctcggtgctgagcctgcacccttacctggacgaactgcgcatcgccgtggagggcaacaccaaccaggcggcggccgtgcgcatcgcctgcctcatccgacagagcgtgcagagcagcacgctcatccgcgtgctcttctaccacacgcccgaccagaaccacatcgaacagcccttctacctcatgggccgcgacaaggcgctggccgtggaacagttcatctcgcgtttcaactcgggctacatcaaagcctcgcaagagctcgtctcctacaccatcaagctgagccacgaccccatcgagtatcttctggagcagattcagaacctgcaccgcgtcacgctggccgaaggcacgacggcgcgttactcggccaagcgccagaatcgtatctcggacgatcttatcatcgccgtcatcatggccacctacctgtgtgacgatatacacgccatccgtttcagggtcagctaggcacgcagcagagccaccaggtgccggcgactgacgccggcatcggcagaaacgagacgatcgtaacccaggcgcgtaaaactccccaagggcgaaaacgtttcggcgtagtcggctaacaaagcccgggccgccgccagcgtccgcgcctgcacgccgccgtgactgcgataataacggcgcagcaccacgttgacaaggtcgttctcctcgacgcgcggcggcggaggatccaaggcctccagcgcctcctggtgcaaatgcagcgaattgagcaacaaacacagacaggcggccagcttcatcgtcttgcgatgtagcagaaaaccgccgcttgcgcccgagacggcggcatcctcgggctttccggccaacatgcccagcatctcctcgcccatctcgtcctcgtccagctcgtaaagacagacttgacaaagaaaatagttctccagacgcggcacgtcgagcaagagcagcttcttagcacccgccagccccacgcagtgttccagcagacgggcggatgaacgcggaatattactcattcgcaaacggtgataagcgctggccaccacaccgtcaaacatgtccgaatcaccgcgcgtggcactctgcaacagcggcgctagacgctcctccatctcgggcggacaaagaaccagctcctcgtgcgagcgccgttccagcaaaaaaaaatattggcggaacgtgttcaccagggcgcgcgccgccgagattcgtcgctgcaccgtagtgatcacaacgtccggcgcccaaagcacgctggtacccggccaaataacgtgtctggggccggtgctgccgccgtcgttgacgcgaatcatataaatgcccggcacgtcgtacagctcgtccctgctgtcgtcgtctccccggcgctcctcaccactcgcatcaccgtcgcgccaccgtagcctactactccccaactgaccgcattccaccaccaacttggcgcaatgggtaatgcccgtaagcgcgtacaccagatcgctatgcttctgccaatagatggagaagacggacgacctgcggttaaaacgaccgctgcaataaaaacacagctcggaagcaaaaaccacgtcgtcttcggcgtcgggcggcggcggtaacacacggcgaatcagttgcgacagcggtccgttgcgaaacgcgtgctcgcgcaccgtaccgtcgtccattaacaacgccgcgtcgtgccaacccggcgtcggacgctcctccggacgaaacgccgcggcggcagcggccgcggcttccatcatcgtgatgcaaaccgcgctcgcggcgacgtgggttcagaactgccgtcaacgctgacggaggttgggacagaagggacggaggaagatgaggacacacacaatgggggaggggatgaacacaggcccgatgtggctgcggccgccgagcacaatcgaaacaacgtctggtggatcacttcgcgcgtgtgcggcgtaccgctgatactctgcaacgcgcccagcacctcgactaacactttgaggcgcgtgcgagggatcttgtgggcttccacgtgccgacacaccgtcagcacgttggcgttccggcccaggtgatccaatttgacttttttgttccgggccaggatcttgggcacgttgttggctagacgactgccgatgagcgcacaagtgtgcttgatcttggtgtgcgccgtgaggttcttgctgtagtcaaagagaccccgctgtgccgcctcaaatactaggcggtccaactgcagccgcttctctcgaccgtgcagcttgagcaggcaagcacgcagaaacagcactaactgcttggccaggaaggggatctggtacgaattgcgcagctctagttgcgtgaaaacacggtgcagaccgtaatcgatgcacacgtcgcgcatgttcttgatgcacgagagttctttgagcagaatggcttccaggtcggcgcccgagacgcgcggcacaatggccgtagccgctttgaaccagcccacgttgacgttgttagtatgcgagatcatgcacggaaagttggtggtccagtacaccttgctgcgctccgagcgaatcaccgcctggtcctccagcccatgcacgtccagcgaggagttgctgttgcacaccacggccggcagaaaaaagtgatcgatattaacgtgcagccggtacacgcccagcgagtacagaaactcggggtaggaaccgcgaatattgacgttgagcgagttgatgtagacggcgtcgttggaaacaaaagtgctgacggtgcaagcgggctccttaaaggtgtgcttgtacatcacaaaactgtgggtcatgttcttgggaagccgcggcgcgcgtacgccgagacccgacgcggcgatggacgagagcgcagccttcatattgataacgcggttggtgttgaaagcgttgacggcgatgcggtctagactcacgcccgtcacctcggcaaactccatcccgccgatgagcttacgacggcacggcgcgtaacgctgcacggctagatgtttacgacgtcggtgttcctgataggcccggcgcagctgctgccccgtaaagtcaaatggcggcgtggcgtcagtctcccccgattccagcgtctcttcctcctcctcttctcccgtctccgaccgccgttgacagtgtttacgccatctctccccgtaccgagcgtacatgagacgcgagataatgcatacgtaacgtcgaacgcgatctgcggccgggtcgcgcggcagtgacagcttgtgacccgcgctcgtcgtcgggagcgcggtggaagacagcgcgtgtccgttcgccgaaaccaccgtcgattctgacggtgacagtcgcgacgtcctcgaagcgcaagaaacaccgtaaccgcggcttacgggtcggtcctccgtcccatgggaccccagatcccgagctagttcgtaataaacgtagaaaaggtttctccacaccgtgtctgtgtcggcaaatgtgacgctaaggcgtcgataacacagtaggttgtggtgtccctgatttccaccgttcccccctcccccacttctgtcagcgtgaccagtccggcacttgccgtagctcacctgtagcttgaagtacagtacctgtcgcttgaagcgactgagaacgaaggtgctcaggtggcacaccgtctgctcgggcaagcgaagcgccatcatgacgcgggcgcggtcgcgatgcagctgagccagtacgcgaccgaaaaactccgacgtgacttcgtggtgatattcaacgcccagccaaagcttttgcagctccagcagaaaaaagtcgcgtgtagcgtccaacgcgcacggcgcttgcggacgcacgttgagtccaaagagcagcttgtagtgaacctggatgcgcggcgccgcggcctcgcccaggtagccggagacggcggttacgtagtcgtctacctcgctgacactgagtacgcgtccgatttccaccatcaggtaaggatagtcgtccaggtgcaggctgaggtcgcgcggcaggcaggccatagcgtagcgttcctcggttcccgaggcgccaccgccgccaggacagtcgcaaaagaggctcggcaattctcgattccattccgtcagcgagagcaatccgcgtagcacatgcgtggccacgtggttttcgagaacgtggtaggacagcgcgcgcccggcggtcacggatccgcaacaacaacgtcggtgcacgtagagcagcggcccgcgacaaaactgcgtcgtaggtaccagatgttcaccgtggccctccacttcaccgtcgcaaaaacagggtacggccacgggtcccagtaacagacgacccagtaccagcttgacacgctcgggctcggtcctcacgtgtatcggacaggcacggtagagagccgcaaaaacagcgcgcacccgttcgacgttaacgggtcgcggacgacaaaagcgggcgtcctcgcccgtcgatagctcttgggtgaggttgcaggcgcgaacgtgcacggggacgtgtaaaacccggcgcggcatagcggagccgccaacgactattagagcgtcacagccgaggcggcgcggcgcagcgccggccattctccgggtcgcgctgctttccccgagctccgacgcctcgcgctcacgccgccgccgcgatggagaactggtcggcgctcgagctcctgcctaaagtaggcattcccactgactttctgacgcacgtcaagaccagcgccggcgaggagatgtttgaggccttacgcatctactacggcgatgaccccgagcgttacaatattcacttcgaagccatcttcggcaccttctgcaatcgcctggaatgggtttattttttgaccagcggcttggccgcggcggcgcacgccatcaagttccacgacctcaataaactgactacgggcaaaatgctgttccacgtgcaggtgccgcgtgtggccagcggcgccggtttgcccactagtcgtcagaccaccattatggtcaccaaatacagtgaaaaatcccccatcaccatccccttcgagctcagcgcagcctgcctcacgtatctgcgcgagacattcgagggcaccatcttggacaagatcctcaacgtggaagccatgcacacggtgctgcgcgcgcttaaaaacacggccgacgccatggagcgcggcttgattcacagctttttacagacactgctacgcaaggcgccgccgtactttgtggtgcagacgctggtagaaaacgccacactggcgcgacaggcactgaaccgcatccagcgaagcaacatcttgcagagcttcaaggccaaaatgctggccacgctctttttgctgaatcgcacgcgcgatcgcgactatgtgctcaagttcctcacgcgtctggccgaagcggccaccgatagcatcctagacaaccccaccacgtacaccacgagctcgggggccaagatcagcggcgtgatggtaagcacggccaacgttatgcagatcatcatgtcgctgctctcaagccacatcaccaaagaaacggtctcggcgccggccacctacggcaattttgtactcagtcccgaaaatgccgtcactgccatatcctatcactcgatcctggccgatttcaactcgtacaaggctcatctgacttcgggccaaccgcatttgcccaacgactcgctttcgcaggccggggcgcacagcttaacgccgctgagcatggacgtgatccgactgggcgaaaaaacggtgattatggaaaacttgcggcgcgtctacaaaaacaccgataccaaagatccgctagaacgtaacgtggacctgacgtttttcttccccgtagggctgtatctgcccgaggatcgcggttacaccacggtggaaagcaaagttaagcttaacgacaccgttcgcaacgcgttgcccaccacggcctacctgctaaaccgggaccgtgccgtacaaaaaatagactttgtggacgcgctcaagacgctgtgccacccggtgctgcacgagcccgcgccctgtctacagaccttcacggaacgcggaccgccctcggaacccgccatgcaacgactgctcgagtgtcgttttcagcaggaacccatgggcggtgcggcgcgccgcataccgcatttttaccgcgtacgacgcgaggtcccgcgcacggtgaacgaaatgaagcaggactttgtggtcaccgacttctacaaggtgggcaacatcacgctctacaccgagctgcaccccttcttcgactttacgcactgccaggaaaacagcgaaacggtggcgctgtgtacaccgcgtatcgtcatcggtaatttgccagatggactggcaccgggccccttccacgaactgcgcacctgggagatcatggaacacatgcgactgcggccaccacccgactacgaagagacgttgcgacttttcaaaaccaccgtgacaagccccaattaccccgagctttgctacctggtcgacgtgctggtacacggcaacgtcgacgcttttttgctaatccgcactttcgtagcacgttgtatcgtcaacatgtttcacacacgtcagctgctggtttttgcgcacagctacgcgctggtgacgttgatcgccgaacacctggctgatggcgccctaccaccgcagttgctctttcactaccgcaatctggtcgccgtgctgcgtctggtaacgcgcatctcagcgctgccgggacttaacaacggtcaactggctgaggaaccgctatcggcttacgtgaacgcgctgcacgaccaccggctgtggccccccttcgttacgcacctgccgcgtaacatggaaggcgtacaggtagtggccgaccggcaaccgttgaacccggccaacatcgaggcgcgacaccacggcgtttcggacgtaccgcgtttgggcgccatggatgccgacgagccgctgtttgtggacgattaccgtgccaccgacgacgaatggacgttacaaaaggtcttttatctctgcctcatgcccgccatgaccaacaaccgggcctgcggcctgggactcaacctcaagacgctgctagtagacctcttttaccgaccggcgtttctcctgatgccggccgccaccgcggtctccacgtcaggtacgacgtcgaaagagagcacaagcggtgtcacccccgaagactcgatagcggcgcaacgtcaagccgtaggcgagatgctgaccgagctggtggaggacgtcgccaccgacgcacatacgccgctgctgcaggcctgtcgtgaactgtttttggccgtgcaattcgtgggcgagcacgtcaaggtgctcgaagtgcgcgcgcctctggaccacgcgcagcgtcagggcctgccggactttatctcacgtcagcacgtgctttacaacggctgctgcgtcgtgacggcgcctaagacgttgatcgagtacagcctacccgtacctttccaccgtttctactcaaaccccaccatctgcgcggcgttgagcgacgacattaaacgctacgtgaccgagttcccgcactatcaccgtcacgacggtggtttcccgctacccacagccttcgcgcacgagtaccacaactggctgcgctcgcccttttcgcgttactcggccacctgtcccaacgtgttgcactcagtcatgacgctggccgccatgttatacaaaatctcaccagtttcactggtgctgcagaccaaggcgcacatccacccgggattcgcactcacggccgtacgcaccgacaccttcgaggtggacatgctgctctacagcggcaaatcatgcacgtcagttatcatcaacaaccctatcgtgaccaaggaggaacgcgacatcagcactacgtaccacgtcacgcagaacattaacaccgtagacatgggtctgggttacacgtcaaatacctgcgtagcctacgtaaaccgcgtgcgaaccgacatgggcgtccgcgtgcaggacctctttcgcgtcttccctatgaacgtgtaccggcacgacgaggtggaccgctggatccggcacgcggccggcgtagaacggccgcaactgttagacacggagaccatctctatgctgacgttcggcagcatgtccgagcgcaatgccgccgccacggtgcacggacaaaaggccgcgtgcgaactaatccttacgccggtgacgatggacgttaattactttaagatccccaacaacccgcgcgggcgtgcctcctgcatgctggccgtcgatccgtacgacacggaggccgccaccaaggccatctacgaccatcgcgaagcggacgcacagactttcgcggccacacacaacccctgggcctcgcaagccggctgtctgagcgacgtactctacaacacccgacatcgcgaacgtctaggctacaactccaaattctacagcccttgcgcgcagtactttaacacagaagagattatcgcggccaacaaaacgctcttcaaaaccatcgacgagtacctgctacgcgccaaggactgcatccgcggcgacacggacacgcagtacgtctgcgtcgaaggcacggaacaactcatcgaaaacccgtgccgtctgacgcaggaagcgctaccgatcctcagcaccaccacgctggcgctgatggagaccaaactcaagggtggcgccggggcttttgctacgtccgaaacgcactttggtaactacgtcgtaggcgaaatcatcccgctgcagcaatccatgttatttaactcgtgaggccgtccggtgaggaggacggcgacgaccgcaggttagcggcgagtcacctagacgcaaacgcgggcccggacgcgccacgctcgctctgacgccgcgcccggtgcagacgttgttcgtctctgcctctcctccgtcgcggccaggatttcaccgccgctatggcggccatggaggccaacatcttctgcactttcgaccacaagctcagcatcgccgacgtaggcaaactgaccaagctagtagcggccgttgtgcccattccgcaacgtctacatctcatcaagcactaccagctgggcctacaccagttcgtagatcacacccgcggctacgtacgactgcgcggcctgctgcgcaatatgacgctgacgttgatgcggcgcgtagaaggcaaccagatcctcctacacgtacccacgcacggactgctctacaccgtcctcaacacgggacccgtgacttgggagaagggcgacgcgctatgcgtgctgccgccgctcttccacggaccgctggcgcgcgagaacctgctgacgctgggccagtgggagctggtgctgccctggatcgtacccatgccactggcgctggaaatcaaccagcgactactcatcatgggcctcttctcgctcgaccgttcgtacgaggaggtaaaggctgccgtgcagcagctgcagaccattacttttcgcgacgccaccttcaccatccccgatccggtcatcgaccagcacctgctgatcgacatgaagaccgcctgcctctccatgtccatggtggccaacctagcctcggagctgaccatgacctacgtgcgcaagttggcgctagaggacagctccatgctgctcgtcaagtgccaggagctgctgatgcggctggaccgcgagcgcagcgtcggcgagccgcgcacgcccgcgcggccgcagcacgtgtcgcccgacgacgagatcgcgcggctgtcggcgcttttcgtcatgctgcgacagctggatgacctcatccgcgaacaggtcgtcttcacggtgtgtgacgtttcacccgataacaaatccgcgacctgcatatttaaaggctgagccggccctctcgcgcccgcagacaccaagcatgccacgcgtcgaccccaaccttcggaatcgggcccgccggccacgagccagacgaggcggcggcggtggcgttggcagcaatagcagccgacacagcggaaaatgccgccgccaacgccgagctctgtcggcgccgccgctcactttcctcgccaccactaccaccacgaccatgatgggcgtcgccagtaccgacgacgacagtctcctcctgaaaacgccggacgagctggacaagtacagcggctcgccgcagaccatcctcacactgacggataaacacgacatccgtcagcctcgggtgcaccgcggcacctaccatctgatccagttgcacctcgacctccgacccgaagaattgcgggatcccttccagattctgctctctacgccgctgcaattgggggaagcgaacgacgagtctcaaaccgcccccgcgacgttgcaagaagaagaaacggcggcttcccacgagcccgagaaaaaaaaggaaaaacaagagaagaaagaagaggacgaggatgaccgcaacgacgatcgtgaacgcggcattctatgcgtggtctctaacgaggattctgacgtgcgcccggccttctctctctttcccgcacgcccaggctgccatatcctgcgctcggtaattgaccaacaactgacgcgcatggccatcgtgcgcctatcactcaatctcttcgcgctccgtatcatcacgccgctgttgaaacggctaccgctacgacgtaaagccgcgcatcacacggcgttacacgactgtctggcgctgcatctgccagaactcacgttcgagccgacgctggatataaacaacgtaacggagaacgcggcttccgtcgctgataccgcggaatcaacggacgcggatctgacgcccacgctgacggtgcgcgtacgacacgcgctgtgctggcatcgagtggaaggcggcatctcggggccgcgtggactcaccagccgtatctcggcgcgcctctcggaaaccacggccaagacattgggaccctccgtctttggacgattggagctagacccgaacgaatcaccgccggacctgacgctgtcgtcactcacgctataccaagacggcatattacgtttcaacgtgacctgcgaccgcaccgaggcgccagccgacccagtggcgtttcgcctgcggctgcgacgcgaaacggtgcgacgacccttcttttcggacgcgccactgccttactttgtaccgccacgctccggcgcggcggacgagggactggaggtgcgcgtcccttacgaattgacgctgaagaactcgcacacgttacgtatctaccgccgcttttacgggccttatctgggtgtttttgtaccacacaaccgtcagggactcaaaatgcccgttacggtctggctaccgcgctcctggttggaattaaccgtactggtgagcgacgagaacggcgccacgttcccacgggacgcgctcctggggcgcctctattttatctcgtcaaagcatacgctgaatcggggttgcctgtcagcaatgacgcaccaagtcaaatccacgctacactcgcggtccacatcccattcgccgtcgcaacagcagctctcggtgctgggcgcttccatcgcgctggaggacctgctgcccatgcgactggcgtccccggagacggaaccgcaagactgtaagcttacggaaaatacgacagagaagacgagtcctgtcactttagccatggtctgcggcgatctctaaacagaggaccctgataatgggaaacggacactaggcgtccgcgccatacgggattaaaacaaaaaaaaatcggtggtggtgtgtgatggggtgtggtgacggtggggcttcgcctcttttttttgtaataaaaaaagacactcaataatccgcggttgtctctgtgtagaacgtttttatttcgggttccgcgtttggtcgcctgcctatgtaaggcggcggccgcagagggcgcgccgctcagtcgcctacacccgtacgcgcaggcagcatggagtcgcgcggtcgccgttgtcccgaaatgatatccgtactgggtcccatttcggggcacgtgctgaaagccgtgtttagtcgcggcgatacgccggtgctgccgcacgagacgcgactcctgcagacgggtatccacgtacgcgtgagccagccctcgctgatcttggtatcgcagtacacgcccgactcgacgccatgccaccgcggcgacaatcagctgcaggtgcagcacacgtactttacgggcagcgaggtggagaacgtgtcggtcaacgtgcacaaccccacgggccgaagcatctgccccagccaggagcccatgtcgatctatgtgtacgcgctgccgctcaagatgctgaacatccccagcatcaacgtgcaccactacccgtcggcggccgagcgcaaacaccgacacctgcccgtagctgacgctgtgattcacgcgtcgggcaagcagatgtggcaggcgcgtctcacggtctcgggactggcctggacgcgtcagcagaaccagtggaaagagcccgacgtctactacacgtcagcgttcgtgtttcccaccaaggacgtggcactgcggcacgtggtgtgcgcgcacgagctggtttgctccatggagaacacgcgcgcaaccaagatgcaggtgataggtgaccagtacgtcaaggtgtacctggagtccttctgcgaggacgtgccctccggcaagctctttatgcacgtcacgctgggctctgacgtggaagaggacctgacgatgacccgcaacccgcaacccttcatgcgcccccacgagcgcaacggctttacggtgttgtgtcccaaaaatatgataatcaaaccgggcaagatctcgcacatcatgctggatgtggcttttacctcacacgagcattttgggctgctgtgtcccaagagcatcccgggcctgagcatctcaggtaacctgttgatgaacgggcagcagatcttcctggaggtacaagccatacgcgagaccgtggaactgcgtcagtacgatcccgtggctgcgctcttctttttcgatatcgacttgctgctgcagcgcgggcctcagtacagcgagcaccccaccttcaccagccagtatcgcatccagggcaagcttgagtaccgacacacctgggaccggcacgacgagggtgccgcccagggcgacgacgacgtctggaccagcggatcggactccgacgaagaactcgtaaccaccgagcgcaagacgccccgcgtcaccggcggcggcgccatggcgggcgcctccacttccgcgggccgcaaacgcaaatcagcatcctcggcgacggcgtgcacgtcgggcgttatgacacgcggccgccttaaggccgagtccaccgtcgcgcccgaagaggacaccgacgaggattccgacaacgaaatccacaatccggccgtgttcacctggccgccctggcaggccggcatcctggcccgcaacctggtgcccatggtggctacggttcagggtcagaatctgaagtaccaggaattcttctgggacgccaacgacatctaccgcatcttcgccgaattggaaggcgtatggcagcccgctgcgcaacccaaacgtcgccgccaccggcaagacgccttgcccgggccatgcatcgcctcgacgcccaaaaagcaccgaggttgagccacccgccgcgcacgcgcttaggacgactctataaaaacccacgtccactcagacacgcaacttttggccgccacacctgtcaccgctgctatatttgcgacagttgccggaacccttcccgacctcccacgaagacccgttcacctttgcgcatcccctgaccctccccccatcccgccttcgcaatgtctcaggcatcgtcctcgcccggtgagggaccctcgtcggaagcggccgcgatcagcgaggccgaagccgccagcggaagctttggtcgcctgcactgccaggtgcttcggctcatcaccaacgtggaaggcggctcgctggaagccggtcgtctgcgactcctggacctgcgtaccaacatagaggtgagccggccctcggttctctgctgttttcaggagaacaaatctccgcacgacaccgtagacctgaccgacttaaacatcaagggccgctgcgtggtgggcgaacaggaccgactgctggtggacctcaacaactttggcccacgacgcctgacgccaggctcagaaaacaacacggtctcggtactggcctttgcgctgccgctggaccgcgtgcccgttagcggactgcacctctttcagagccagcggcgcggcggcgaagaaaatcggccgcgaatggaagcgcgcgccatcatccgccgcacggctcaccactgggccgtgcgactgaccgtaacgccgaactggcgccgcagaaccgacagcagtttggaggcagggcagatctttgtcagccagttcgcctttcgcgccggcgccatcccgctgacgctggtagacgccctggagcagctggcctgttcggaccctaacacgtacatccacaaaacggagacggacgaacgaggccaatggatcatgctgtttctgcatcacgactcaccgcacccgccgaccagcgtgtttctgcacttttcggtttacacgcatcgcgccgaggtggtggcgcgacacaatccgtacccgcacctacgacgcttgccggacaacggcttccagctgttgattcccaaaagttttacgctgacgcgcatacatcccgagtacatcgtgcagatccagaatgctttcgagaccaatcagactcacgacaccatctttttcccggaaaacatcccgggcgtctccatagaagccggcccgctacccgatcgtgtgcgaatcaccctccgcgtcacgctgaccggcgatcaggccgttcatttggaacaccgacagccgctaggccgcatccactttttccgccgtgggttttggactctcacacccggtaaaccggacaaaatcaagcgtccccaggtgcagctgcgcgccggtctctttccacggagcaacgtcatgcgcggcgccgtctccgagtttctcccgcagtcccccggattaccacccaccgaggaagaggaggaagaagaggaagaggacgacgaagatgacctctcctccacaccgacgccgacccccctgtccgaagccatgtttgccggcttcgaggaagccagcggcgacgaggactcggacacccaagccggactgtccccggcactgatcctgaccggacaaagacgtcgaagcggtaacaacggggctctcacgctcgtcatcccctcgtggcacgtctttgcgagccttgacgacttggtaccattaacggtgagcgtgcagcacgccgcactacgacctacctcttatctgcgcagcgacatggacggcgacgtgcgtaccgcggcagacatcagcagcacgttgcggtccgtgcccgcgccacgaccctcacccatcagcaccgcttccacttccagcaccccacgcagtcgaccccgcatctagagagagacttctttgtttttcccccgcgtgtttttcccattccctgtatttatttctaaataataaaaacacagagacgttgataataaccgcggtgtgctttattagggtatcacggtgtagaaaaaaaagagagggaagccctaaatatagcgtctctcttactcgagcttattgagcgcagccacaaaaatccgccgattcagatctaccatgtctttgggcgggctctgggaagctgcggcggcttgggcagcagcggcggctaacacgacactagccgggcaggaagaagaacctgccgtcgagggcccggccgttgccgcctcagaacccgacgcggtagcgaggcggcaactggcgttcaccacgccggcctgagcgcgctcagctaccttggcacctccggatagaagtgccgtgggtgtttctcctccgccactcgtcagctcgccggtgggagtacacacggtagtagtagttggggaggaagaggccgcagagggaagagccgccgaaagtaacgtagaactctgccgcgcagcaaacagatcgcgtttcagctcgtgaatggcatcccgcagttcatcgtaacgttgttgctgctgctgattggaacccgcgtgcccgccacttccaccgtcgctattgacgtgactttttagacgctttcgtgcccggccgtgctcggcctcgcctgggaaactcaagtcttcgtccgaggacgacgacgacgccgccgcggtttccttacggcgtttgttgtgtccgccgctgcccccgtgacggtgctgcttctgcgactgaccacggtgaccaccgtcgtaacgctcccatccggacggtggttcatccataccgcccggagagtcgcgccgacggtaataggccggtgatggtggcggcggcacgggataagacggatgcaaagacggcgcgggctcgtaacgccgaccccacccgggataatggggatccacgtagtccgcaaagtgacgtgccgccaactggtcgtaacccacgacgggggcgccgtaggacgcgggataagacggcaaaggcagcggtgctggcgaagcagaaggaggggccgctacggcgccgggatacatgacgggcactgccgagcgactggccccaagtagcgagaaaaaagcgtctttgggtaaataaactccgtcgtgaggccacgctagagacgacacagccggcgacgcacctgccacggtagcacctggaggagccgtagcggcgggaaccgcagcactcagagggtgcgacatggacgccgcctctgccggctccgagggagaaagcgacggcggtgattccgcgggaagaacggacggcgacgctggaagcgcaggcggctgtacaggagatggcggttcgactggaggcgacggggacgaagagggaacgcgcgccccagccgccggcgtggcggcctgactgcggctgtcgcccgaacgctcggcggacgccgctttaatatcgcacgccgcctcaggcgaaacgctcgccttgacgtatgactcgcgctccgtcacgccgactagttgcttgtcgtagcgcagcttgggcagtcgctcacggatgtagagcgcgtccacgctgttgcccaacaggccgtagctgtctgagcgaaagggatcgcccgacgcgtcgacagcagtgctgccgcagcgctgccactgtgcacgtagcccgtcacggtcggccgccgtgaggtctggaaaccgctgtgtgacccactcgggatcgcgcccgtacacggccaacgtaccgcgacgccgacccacgctgcacaaagccacgtgtttgaacggcgtggtttccgagcccgaaagcgacgtcgcggcctccacgtcgtcgcagcgccggctggagagcgagaggccggcgtagctgccgctgagaaactccaccaccttgtctggctgcagcggactgacgggcccgcgcgaaaccagctcggacttttccgaagcgcggcgtacaatctccagaaacctgggcgaagtgacgcagcccaggcaaaaaagaccgtcgcggacgctctgcatcgccgcaacgtgtcctacaacggccgtgtcgtcgtggttgatgttgagcgggagcgcgaccgacaacgaaggctgtccctggccctgcgcgtgcaaccagtgctccactacgtcccgcggcaacagcaattcggcctcgtccggagactggtcgtagcgggcgagaaagccgcccacgtagaccggcgccacagcctgcgactgctgctcgtccatcgtcattgtcgtcaccgtcgctacccgctcaccgagcgaacgatgatggcccgcgacgaagagaaccccgccgtcccgcgggtccgcacgggcaaattctcctttacttgcgccaatcatctaatattacagattagcgagaagatgtcgcgcggacagccgctgagctcgctgcgtttggaagaactcaagatcgtacgcctcatctgcgtcctcctctttcaccgcggtctcgaaacgctgctactgcgcgaaaccatgaacaacctgggtgtctcggaccacgccgtgcttagtcgcaagacgccgcaaccctactggcctcatctgtaccgcgaactgcgccaggccttcccggggctggactttgaggcggccgtgttcgatgaaacgcgcgccgcccgtctcagccagcgcctgtgtcacccgcgcttgagcggcggactgctgacgcgctttgtgcagcgccacaccggcctgccggtcgttttccccgaagacctggcgcgcaacggcaacatcctcttctccctaggcacgctctacggacaccgcttgtttcgtctggcggccttcttcacgcgccactggggtgccgaagcgtacgaacccttgattcgcatcatctgtcaaaaaatgtggtacttttatctcatcggcaccggcaagatgcgcattacccccgacgccttcgagatccagcggagtcgacacgagacgggcatttttacttttattatggaagattacagaacgttcgccggcacgctgtcccggcacccgcaccgtccgcacccacaacagcagcagcaccaccaccccggtcccccccatcctcctctttctcaccctgcctcgtcctgtctcagcccagaggccgtactggccgcccgcgcccttcatatgccgacgctggctaacgacgtgtgaacctgacgtgatttatctgccacttttctccccgctgccgtacagcgccgccgctcataatgccgtcaccgtcgcgtccgacgcgacggtgttttcgccgtcggtgcagaggacggaggaactttcggccgaaacatcgatcgtagtcccaggacacatttcggaagccatgccttccgcgtgctccaccaacgtggctttctccgacgtggttgtcgttaccacaacggccgccgacgtcgcgtcggcgtaacaacggctggaggactttttcaccgcctcggcgacgtctcggacggacgtagaaaagtaacacacggccagctccacgctatacatagcccgcttcaacgcctgcaccaaccgacgtacgaaatgaccgtggcagctttgctgacatctctcgaccagataatcaaaggagtcatccagatccttggtgggctcgcgggagaagaacgcaatgataaagagcggcagaatgccaagacgcatggtgagaagggtacgcgtagccaattccacgtaatccataatgccgaaaccggtgccggccgcgctagcgggctgcagtacaccgcgtaggactctgaagcagtagtagggcacaaacagcatgagacacgtcacgtagaaggtgcagacacgacccacgtaggaccagacgtggtcgcgccgatcgctgtaggccaactctaccacgttagccagtacggcgatcatgggcgcccccagcaaaaaccacatcttgatggtgaggtccaccgcggcatactgtatagggatctgacagcctagccaacggtagtccagtgaacccgtagcggcggtgggcacagcggctacgatgaaaagaacccaggcaaaggcgaccgcgtagagcgccacgccggcgttttcgcgcgtctcatgatgccagagatcacggccgtaagatatggccgacagacgatccagtatcagaaagaggaaaaacaacgccgtcgaatataggcccacgtcgtcgacaaagagcactaagcgacagaggctgagatttagagcgccacgcagcatgatacccttggacaacatggtggccaggatggaaaaaaactgactaagtaccagattccaagtaaaaatcatcacggacacgggcggccgcgtaacacgcaacacccagaggcaaccgatgatagtcagcaggttgaccaggctaacggagccgaacatgccgatgagtagatccgaggcggcgcgatcggccgacatagagtagccttcgaacgggcccatgtgtttgaaactcacaatagcgaacatgatggactcggtgactgaggtagtctcctccacagaaggggacatacccaccaccgccgcccgctctcgccgaacgaatataccctctccgaggacgttcgccctttatgcagcgagcgacacgtggtggaaattacaacaccgccacgctcggaagaaaccccaacactaaaaagtacaacagttcgtaaatatcgttgacgttaaagagggacgagcccagagtggacacacggtgacgcggcagggtcactgacaacagccgccctagcccgtgttcgtagtgaaagagcagggcatcgtgtacctctaagcgacgtaaatcgccgtactgtttggagctctgcgcgaacatgtagtcggccacggggttgctcttgctgagctgcatgagcacggcgccgccgccgtcgccacctccggcgctgtcctcgcgacgtgagggatcccagccgctgcgcacgctctcggtcacggccaacagagccaggccgggaaagagctgcgacagcgtgaccgcggggtcgcgcgcgtaccacggcccgatgtagtaccgtaccagaaactcaaagttacgtacccgcccgtgccgtcccccgtagccctcctcttcgccgcccgcgcgccccccgggcaacccgccgccggctacggcatccgaacccagcaggtcggccaacgtaaatttgcccgtgcgcggagcgaagacgctatccgcgttggtcaccttccacaacaacagcaggccagccaggcaggtcaggcccgaacgcagatattgctgttcgtgcacaaagacgggcacgtcgcgacccagcttgccgaccagcagacgtcgactccagagagaaagcacgtcgtcgcgcacctggcccgacagacgctcttgcaccagctcctccgttatcgtcccgtagcccggcaaatgctgaataacgccgcgtttgtggaaaagccgcaccagcacgtgacgatcaaaagtgcccgggtgatagtgacgaccaccgcttaggggcatgtagtagcgtagatcgggcgagtcgcgatacgcgtaatagttgttacccgcggcgacggggccttcccaagcggcaatctcacgactcacgtcgtcggccagacgcggcaacagctgagggagctcacccaacaccgtcgccacggagtccggcggatcgcggccctcccaaagcgcatgtccgtaggcggccagcagacaggcggcggcttccaaatcggagagtacacagtcgtacgtcggatacaccgtcacgttttccaaagcgttgaccacgccgagcagcagctcctgcgaaatggaaaagttgtccatctgcgccagatggtacactcgtttccaccgtggttgcgtgtacaacccccgcttgagccgatagtaccagataccaaaggagaaagtccaagtagaggcattctcgaacatggtgttgaccacctcgccgcgaaaatcggtgtgaaagcggataaagggatcgttctgcgtgattccaaagtagctaggtacgttcccgggcaacggccgctcggcgcactgcgccagccaggtagaagaagcaccggcggccgctgacgcggcgaccgcgtcagacggggcgaccacgtcagacggggcggcggcgggtcccgtgatggcatcgtgccgactataaagaccgtgtgggacggcagaagctcctgccacgccggtccctggggacgaagaacgcggacgacacggtggttgtagcagcgtccgcggcgacggtccttcgtcgagctcgcactgctggttcaacagcgcctccgcctcggacacgcgcccttcgagatcctcgcagtaagtctgcaccctgtgacccagatccctgagctcctgacgcagataccgtttgcgcacccggtccatgagcacgtcctcgcgccagcccccgccgcgcattgtcaccgccgcgtcctccagcaaccgccgaagcacgcgctcggggcagcgcagcacgttttcctcgtgcggttcgaagaagacggcgacgggtagccgccaaaaggtgtgcaacagactcatcctgacgccgtcccagatagtccaggacagaatcggtacacaagtcgaaacggcccgaacgaaaagcccggtaaaaagatgggcgatcggccttttgctgaaaaaaaaccagactgggcactacgctccagacttgaccgccaccgcgcggcagacgcagaaaatcaaagtccaccaaggcgcccttgagctggcgcaggccctcggcgtactgcaggctgtgggtggcgtgccaccgcacggactgatcgtcggcgtctgagtacgtagttttgaactcaatcacgtagcaatacacgatgccgcgcgacccagagtccggcggtaaaaacaccaacacgcagtcgggaatccgccgacttaatcgtacttcgatgaaaagacggcgacggtacttttgcagctcgggtgggaaaaggcctcccaacaggcggttgagggccacaaacgagggaaagacccgcaacaggcgacggtagatgtccaggtgcttacgcttaccgatccgcttacgcacgtgaggcaatctccgcagagcgttccccgtcgaatcagcgtcgtccccacgcccggacggcatggcttacccgcgtgtcccctcttcttccttcgcagcggccaatgacatcgtattaaatagacagagacgcgacttttgtaacccgtagcgccacacccgggtgccccttcctgggatcctttctctccttctctcgggtgtaacgccaaccaccacctggatcacgccgctgaacccagcggcgcagccgcgctatgcggcccggcctccccccctacctcactgtcttcaccgtctacctcctcagtcacctaccttcgcaacgatatggcgcggacgccgcatccgaagcgctggaccctcacgcatttcacctactactcaacacctacgggagacccatccgcttcctgcgtgaaaacaccacccagtgcacctacaacagcagcctccgtaacagcacggtcgtcagggaaaacgccatcagtttcaactttttccaaagctataatcaatactatgtattccatatgcctcgatgtctttttgcgggtcctctggcggagcagtttctgaaccaggtagatctgaccgaaaccctagaaagataccaacagagacttaacacctacgcattggtatccaaagacctggccagctaccgatctttttcgcagcagctgaaggcacaagacagcctgggtcagcagcccaccaccgtgccaccgcccattgatctgtcaatacctcacgtttggatgccaccccaaaccactccacacgactggaagggatcgcacaccacctcgggactacatcggccacactttaaccagacctgtatcctctttgatggacacgatctgcttttcagcaccgttacgccctgtctgcaccagggcttttacctcatggacgaactacgttacgttaaaatcacactgaccgaggacttcttcgtagttacggtatctatagacgacgacacacccatgctgcttatcttcggtcatcttccacgcgtactcttcaaagcgccctatcaacgcgacaactttatactacgacaaactgaaaaacacgagctcctggtactagttaagaaagctcaactaaaccgtcactcctatctcaaagactcggactttctcgacgccgcactcgacttcaactacctggacctcagcgcactgttacgtaacagctttcaccgttacgctgtagacgtactcaaaagcggtcgatgtcaaatgttggaccgccgcacggtagaaatggccttcgcctacgcattagcactgttcgcggcagcccgacaagaagaggccggcaccgaaatctccatcccacgagccctagaccgccaggccgcactcttacaaatacaagaatttatgatcacctgcctctcacaaacaccaccacgcaccacattgctgctatatcccacagccgtggacctggccaaacgagccctctggacgccggaccagatcaccgacatcaccagcctcgtacgcctggtctacatactttctaaacagaatcagcaacatctcattccccagtgggcactacgacagatcgccgactttgccctacaattacacaaaacgcacctggcctcttttctttcagccttcgcgcgccaagaactctacctcatgggcagcctcgtccactccatgttggtacatacgacggagagacgcgaaatcttcatcgtagaaacgggcctctgttcattggccgagctatcacactttacgcagttgctagctcatccgcaccacgaatacctcagcgacctgtacacaccctgttccagtagcgggcgacgcgatcactcgctcgaacgcctcacgcgtctcttccccgatgccaccgttcctgctaccgttcccgccgccctctccatcctatctaccatgcaaccaagcacgctggaaaccttccccgacctgttttgtctgccgctcggcgaatccttctccgcgctaaccgtctccgaacacgtcagttatgtcgtaacaaaccagtacctgatcaaaggtatctcctaccctgtctccaccaccgtcgtaggccagagcctcatcatcacccaaacggacagtcaaactaaatgcgaactaacgcgcaacatgcacaccacacacagcatcacagcggcgctcaacatttcactagaaaactgcgccttttgccaaagcgccctgctagaatacgacgacacgcaaggcgtcatcaacatcatgtacatgcacgactcggacgacgtccttttcgccctggatccctacaacgaagtggtggtctcatctccgcgaactcactacctcatgcttttgaaaaacggtacggtcctagaagtaactgacgtcgtcgtggacgccaccgacagtcgtctcctcatgatgtccgtctacgcgctatcggccatcatcggcatctatctgctctaccgcatgctcaagacatgctgactgtagaacctgacagtttatgagaaaagggacagaaaagttaaagacattcacacaaaatcttctaaaacggtacgggccccaatacttaggggcactcttgctcgttgtaataaagtacacgccacacggtgtgatggtactatatgcgtgaggtctgtgcgtctttatttacgaggtactgttatgggtctggttacatatcgggccctggatacaagcttggtacacagccaaggtgcgggagactaggtcgtcttggaagccgatgcaacaacggtagatgagcagcaaaacgaccagaatcagcagtgagtacacgcaggcaagccaaaccacaaggcagacggacggtgcggggtctcctcctctgtcatggggagaaaagagatgatggtgagagacgtccctaagatggtgtttctaatatctatatctttcttgcttgtttctttcataaactgtaaagttatgtcaaaagcgctttataatcgtccttggaggggcttggtactgtctaagataggcaaatataaattagatcagcttaagttagaaattttgagacaactagaaacgactatttctacaaaatacaatgtaagtaaacaaccggttaaaaatctcactatgaacatgacagagtttccacaatactacattttagcgggccccattcagaattatagtataacctatctgtggtttgatttttatagtacccagcttagaaaacccgcaaaatacgtttactcacagtacaatcatacggctaaaacgataacattcagacccccaccttgtggtactgtgccttccatgacttgtctttccgaaatgctaaacgtttccaaacgtaatgatactggcgaacaaggttgcggtaatttcaccacgttcaaccccatgtttttcaatgtaccgcgttggaacaccaaattgtacgtgggtccgactaaggttaacgtagatagtcaaacgatttattttctaggtttaaccgccctgcttttacgttacgcacaacgcaactgtacacacagtttctacctggttaacgccatgagccggaatctatttcgcgtccccaagtatattaacggcaccaagttaaaaaacactatgcgaaaactaaaacgtaaacaagcgcccgttaaggaacaattcgaaaaaaaagctaagaaaactcagagtactactacgccatacttttcctatacaacgtctgccgctctcaacgtcactactaacgtgacttatagtattactaccgccgcaaggcgggtttccacgtctacaattgcttatcgtcctgatagcagctttatgaagtccattatggccacacagttaagggacctagcaacgtgggtgtataccactctacgttaccggcaaaatcctttttgtgaaccaagccgcaaccgaaccgccgtgtcagaatttatgaaaaacacgcacgtactaatccgtaacgaaacgccgtacactatttacggtactctcgacatgagctccttatattacaacgaaaccatgttcgtggaaaacaaaacagcttccgatagtaacaaaactacacctacgtcaccatcaatggggtttcagagaacatttatagatcccctgtgggactatctagactcgctgctgtttctagatgagattcgtaactttagcctccggtcacccacgtatgtaaaccttaccccgccggaacaccgccgggctgtaaatctgtccaccctcaatagcctttggtggtggttgcagtaaagttctggaagcagcaatgtcgtagtacaatacaaaaagctcccatgagaattagagcattaagcatagtccaccaggccgcaaagctggacagtgagagctcatacatatgcgatgtgcaatgcgccttgtaaaaatcatcgttcgcatgtcgtctcatcacattaggatcgtgggtggtagaactgagtttagtgctagttgtcgataaggtcgtagtcgtcgtagttgttgcagaagttgttgcaactgttgttagtttggtagttgatacgctagcagaagactttgatgtagttgcagaggttgacgtggatgaattgttaccagaactctctgccactaccgataaaactaaaagacctaatactagtgtgttccactccatcacaccaccgccacgatgcttacgatgttgaccgaccgaatcgactctcaactggtactgtcgcggctgccgcgctcccgttttcagcgattctgggagacccctacgttaataatgaaggaagagtccgcatcgtcatcaggctccatcatcctagccgagaaatccgtcaacatgcgttactgcgtgcgtttcgctagcgatagcgattttcaaaccacatttacgctgccccaatcgaccgaggagaaatacgacaaagagcagcatccgggagaggatgaagcgtcgtcgccattaccgtcaccgctcaaagttccttacaagtggatgccttccagtttcatcgtcaaacaatgccacacgcagctggccttttacaataaacacatcatttggctatcacgcgagcgcaaagtgcccacctcgctgggcgtcagcctctatatccccgaaggttttttcggcattaccttttacaaatgcctggacgcgcaattcgtttgcatgcccgagctgctggaatccaggctgcaagtcccgcagttggatgtcgtcaacctcaacgacacttttcagtccatctttccgggcaccatcgaaggcgatatcggcgttttcccctgttttgtaccagaaccctggcagctcatgaacttgccgccgcccaacgaacaccgtttcttttcgttacgtacccgtcagacgctggtgatcggtccgggtcacacgcaaaccgtctattttgacgcggcctacgtgcacgcgcccggtatctgcgccctcatagtgggcgtgcgccagtttagtcaatcggatctcatcatccgacccaccatctggctcccgggtaccgcggccggcgtgacggtggtcaacacttcgcacaccaccgtctgcatctccccacacaccaccgtagccaaagcggtttttaccacccaccgctttacctatctgccggtgggcagtcaccccctaggacagatgatcgtgccgcccacccccgacatcggtttcacccacacgcccgagcacgcgttgctgcaacggacaccctcgccggtagacgatgacgtcgacgagacagaagaagatgaaaagagctccgacgcagaaagccctgtcaacacgaatgacgttatttttgacgtcggcccgaaacctccccgtcatccctgacctaataaagtacgtctatgagaaaccccgtactcgtcgtgtccgtgatcacgtacgttttccaaaacgtgccaggctgttcacgcggaggacagcaaggccgccgccgtgggtttctttttcttcacgcccctgagttcacgcgcggaacccacaaagggtatctggggaggaggtatggtgaccatggtcggtgacatcaccgcctcccgaggcacgtcggggctgtgtcgcatgagatccaaaatctcgcgttcgtgattcgtaggcagcgtctcttgcggcgccgactccttgtagcgccgacggtgagacccgcgtccctggggctgctgctgcacgggctcgaccggcggctgctgttgcacgggctcgggtgacggcgacatcacggtcacttcatcctcctcgtcgccctcttccagcagccgctggtcgaacctcataacggtaggacaggagacggtgttaatgtgagccaaactcatcataggacgcgtgacccccgtttcctcggggatcagcgagtccgaaaccgagggacaggcaaaggccgacacggcggcaaccgtttccccgtcctcgcggacgccgctttccccctgaacgaccgccggtggcgtcagtggcgcaaccgtcgcagccgcgccggcctcgagcatgtacgcgcttttctcgcagtccatgtccaccaggcccataacgcgctgcacctccaccagcgaggcctgatccgtggagaacttgtccagcaacatctccaggctgtcggcctcggacatggcaaactcgcccaccaccagtttgaggatgagaatgtccagggcctctaggatacgctgcgatttcttgcactccacctcggccgccggccgcgtgtgaggcaaacagccctccgagagatagcccttgaggaacgcgcacttgctctggcattgcctatagagcggcagcagcttcagcaggtggttcaccacgtccgtgtcgcgagaaaaggttcgcaggtcggccggggtgatctccagctgcttaaagttctcgtccagaaacgcctgcagctcgcgcagctccacgtcctcgctaggctgcagcagcacgtaatcggccacaggcgcggctttgcgacggcacatcagcagctcgcacaggcgctgggccagctgcatcgtgccggcgcgacgatgacgctcgttctgttcgcaacagagtatgattctgctcatatagtcgccaacgtactctcgcagacaccgacggaccactgcgtcttccccctgctggtcaaacaccaggtctcgcgacgtgtttacttctgcctacagacgcaaaagtgctcggactcgcggcgggtggcgcccgtcttcgccgtgaacaacgaaacgctgcagctctcgcgctacctggccgcgcgccagcccatccccctctcggcgctcatcgccagtctggacgaggccgagacgcaaccgctctaccggcatcttttccgcacgcccgtgctctcgcccgaacacggcggcgaggtgcgcgaattcaagcacctggtgtactttcaccacgcggccgtgctacgtcatctcaaccaggtcttcctctgccccacctcgccctcgtggttcatcagcgtcttcgggcacaccgagggccaggtgctgctgaccatggcctactacctattcgagggccagtacagcaccatctccaccgtggaggagtacgtgcgcagcttctgcacgcgcgacctgggcaccatcatccccacgcacgcctccatgggcgagttcgcgcgtctgctactgggctcgcccttccgtcagcgcgtgtccgctttcgtggcgtacgccgtcgcgcgcaaccgccgcgactacaccgagctagagcaggtggacacgcagatcaacgcgttccgcgaacgtgcgcgtctgcccgacacggtctgcgtgcactacgtctacctggcctaccgcacggcgctggcacgcgcgcggttgctcgagtaccggcgcgtggtggcttacgacgctgacgcggcgcccgaagcgcagtgcacgcgcgaaccgggttttctgggccgccggctttccaccgagctgctggacgtcatgcaaaaatacttctcgctcgacaactttctacacgactacgtggagacgcacctactgcgtctcgacgaatccccccactcggcgaccagcccgcacggcttggggctggccggctacggcggccgcatcgacggcacgcacctggcgggcttcttcggcacctccacgcagctggcgcgccagctcgaacgcatcaacacgctttccgagtctgtcttctccccgctggaacgctccctgtccggcttgttacgtctatgcgcctcgctacgcacagcccagacttacaccaccggcacgctaacgcgttactcgcaacgtcgctacctgctacccgagcccgcgctggcaccgctgctggagcgaccgctgcccgtctaccgcgtacacctgcccaatgaccagcacgtcttctgcgccgtggcctccgaaacctggcatcgcagcctctttccgcgtgacctgctccgtcacgtacccgacagccgtttctcggacgaggccctgaccgagaccgtgtggctacacgacgacgacgtggccagcaccagccccgagacacagttctactacacgcgacacgaagtcttcaacgaacgtctgcccgtcttcaattttgtggccgactttgatttacggctgcgcgacggcgtctccggtctggcgcgacacaccgtctttgagctatgtcgcggactacgacgcgtctggatgaccgtatgggcgagcctctttggctacacgcaccccgaccggcacccggtctatttcttcaaaagcgcgtgcccacccaacagcgtgcccgtggacgcggccggcgcgcctttcgatgacgacgactatctcgattaccgggacgagcgcgacacagaggaagacgaagacgggaaagaggataaaaataacgtcccggataacggcgttttccaaaaaacaacgtcctccgttgacacgtcacccccttactgccgctgcaagggcaaactggggctgcgcatcatcacgccgttccccgcctgcaccgtcgccgtacaccccagcgttttacgcgccgtggcgcaggtgctcaatcacgccgtctgtctcgacgccgaactgcacacgctgctggaccccatctcgcatcccgagagcagcctagacacaggcatctaccaccatggacgctctgtacgtctgccctacatgtataaaatggaccaagacgacggctatttcatgcatcgccgtctgttgccgctgttcatcgtgcccgacgcctaccgcgaacacccgctaggctttgtgcgcgcccaactggatctgcgtaacctgcttcaccaccacccgccgcacgacctgcccgcgttgcccctgtcgccgccgccacgcgtcattctcagcgtacgcgacaaaatctgcccctcgaccgaagccaactttatcgagacgcgctcgcttaacgtgacgcgttatcgacgccgcggtctcaccgaggtgctcgcctatcacctgtacggtggcgacggcgccactgccgctgcgatttccgacacggacttgcagcggctcgtcgtcacccgcgtgtggccgccgctgctcgagcacctcacgcaacactacgaaccgcacgtcagcgagcagtttaccgcgccccacgtcctcctctttcagccccacggcgcctgctgcgtggccgtcaagcggcgcgacggcgcgcgcacgcgggattttcgctgtctcaactacacgcaccgcaacccgcaagagaccgtgcaggtgttcatcgacctgcgcaccgagcacagctacgcgctctgggccagcctctggagccgctgtttcaccaaaaagtgtcactccaacgccaaaaacgtccacatttccatcaaaatcagaccgcccgacgcgcccgtgccgccggcgaccgccgtctgagcctcactttccacggcgccggtgacccgccccccggcagcggtctcatctatatatacatcagcgtgcccgaacgtgaccttcctagcgacggcggccatggagctgcactcacgcggccgtcacgacgctccgtcgttatcttccctgagcgagcgcgaacgccgcgcccgtcgcgcacggcgcttctgtctggattacgaacccgtgccacggaagttccgacgcgagcgaagtccaacctcgccgtcgacacggaacggagcagccgccagcgaacaccatctcgcggaagataccgtcggcgccgcctcgcatcatcaccgaccctgcgtccccgcacgacgaccccgctacagcaaagacgatgataccgaaggcgatccggaccactatcctcctccccttccaccctcctcccgccacgcactcgggggcaccggcggacacatcatcatgggcaccgcgggcttccgtggcggacatagggcgtcctcctctttcaagcgacgcgtggccgcgtccgcctcggtgccccttaacccccactacggtaagtcttacgacaacgatgacggcgaaccgcaccatcacggcggcgattcgacgcatcttcgtcgccgagttcccagttgtcctacgactttcggttcttctcacccctcctcagccaataatcatcacggatcgtccgccggaccgcaacaacaacagatgctggcgcttattgacgacgaactggacgccatggacgaggacgaactacagcaactcagccgtttgatcgaaaagaaaaaaagagcgcgtctgcagcgcggcgccgcctcgtcgggtacctcaccgagttctacctcgcccgtttacgaccttcagcgctacacggccgagagtctacgtctggcaccctaccccgccgatctcaaggtccccaccgccttcccgcaagatcatcagccgcgcggtcgcatcctgctgtcacacgacgagctcatgcacaccgactacctgttgcacattcgtcaacagttcgattggctggaggaaccgttgctgcgcaagctggtggtggaaaagatcttcgccgtgtacaacgctcccaacttgcacacgttgctggccatcatcgacgaaacgctcagctacatgaagtaccaccacctgcacgggctacccgtcaacccgcacgatccctatctggagacggtgggcggcatgcgtcagctactcttcaacaaactcaacaacctggacctgggctgcatcctggaccaccaggacggctggggcgaccattgcagcacgctcaaacggctagtcaagaagcccggtcaaatgagcgcctggctacgcgacgacgtctgcgatctgcagaagcgtccgcccgagaccttctcgcaacccatgcaccgcgccatggcctatgtgtgctctttctcgcgcgtggccgtctcgctacgccgtcgcgcgttgcaagtcaccggtacgccccaattttttgaccagttcgatactaacaacgccatgggtacctaccgctgcggcgctgtctcggacctgatcctaggcgccctgcagtgccacgagtgtcagaacgagatgtgcgaactgcgcatccaacgcgcgttggcaccctatcgtttcatgatagcgtactgtcccttcgacgagcagtcgctattggatctcaccgtctttgccggtacgacaacgacaaccgccagcaaccacgccactgccggcggacaacagcggggaggagaccaaattcatcccaccgatgagcaatacgcaaatatggaaagcaggacggacccagcaacgctgacagcctacgataaaaaggacagagaagggagtcatcgacatccctctccaatgatcgccgccgctcctcccgcccagccaccgtcgcaaccacagcagcactactctgagggcgagctggaagaggacgaagacagtgacgacgctagcagtcaagatctggtacgagccacggatcgacacggggacaccgtcgtctacaagacgaccgcggtccctcccagtcccccggcgcccctcgccggtgtccggagtcaccgtggtgagcttaacttgatgacgccgtcgccttctcacggcggcagtccaccccaggttccccacaagcagcccatcatcccggtgcagtccgccaacggtaatcacagtacgacggcaacccagcagcagcagccgccgccgccaccaccaccaccaccggtaccgcaagaagacgactcggtggtaatgcgctgccagacgcccgattacgaggacatgctgtgttacagcgatgatatggatgactaaaaagagagtgaagggtgttgtgcgtgatgattgctgtcccttatcccgttacaaagaaaagaaaaaatggtgttacacactccttggtactactatgacccgtggtgagatatccgatgatgataataatgatgtacgcgtgcctgagcttggtgttttttctctctgtgagcttttttccccataagctgtgtactgttcgtgtccggaccccatacacggtttccgttaatgacggccccctccttttcccccaccgtaaaaaaaaaaacaaagcacaatacacatgtggttttttggttcgaatcgagcttggcgtttatttcttctcgagccccacgtcctctccctcccattctttttatatatacacatgcccaagattgggggggaacgtgtgtcgtttccaggtcgtggtgacgatgatgatgtggtttttatcggggtggtagtacaagggtttgctactgtagtcgaaaaggtgggccgagaacatagaggaactaactcctaagcgatggctcaaaggcggatgagcaaatcattaaaatccttgactgtctatggttatgcaaaaggatatataaagtataaatagcgtatataaaaacatatatctatgtacaagacgcatgggataaataacacgtatttacacatttttctgcacatgtacaacatttgaggacgaggagacgacgaccggccggtcgccgccgccgcggttgctactactttcttaagtgatgcgaattggtggctatggtgaggagtttggaggaaataatatacatcatatattctgatgacagtgtagtaaacatttcactggcttcggcccggtgcgacggagggccccgacgtcccctctcccggaggggggaagaggcacgacgagcgagggccccgtcgtacgaggaacaagaatctccttcattctttcacagtaaagcacatttctttatgtggggacgggaatcgatgtcatttgtgtatttgcattcggtagagagctacagtctccagtttcacgatcgttgtgcatcatacaacgacactttttatcctacaaatttcacacctatctatatacacacaatataaggttatagcatcatctagtttgttcatttcatacctgttgagaacgtttatgttctagcaattgatttcgcgtcatagggctgtgacggtgattcttcagagaatcagaaaaaaaaaagaggctcaacgagcaccaaaggctaagtcggaaaactcgcgcccgcttccccggacggtttcggcttagcctctggcctgcgatggtttttttattccaagttcgttccatgaatagagcgttatacgattgtgttttcgtgtcattcagacgtggttgatcatgttactacgtgtgtgttttttgctttggtcggtacacggtccctttcagcggacccagtgttccttggagagacgaaaagcgagcgtgtttcacgagatggctgatgccgagtgtcgtcgacataagtcattttctaaagaagcaacataaaaaaaagatgatgtggttcgtcgtactcacagtctcgtttagctactatagatattatagatccagagagcgtaccgcccgagagaacaccgtcttctccgggacgtcttgccgtcgtccgtcacccgggcgtcgagatgttcgtagagaacgatggaggacgaccaacaccgacaggtggtgctcatgagggtgtggtgtcgatggtgcgttttttttgcctcggcacgaccgtatttgcccgtcttaccgcacctccggaaagatggtgtttttacgcaggtgggtgaggcagtttttttttcagatgacaacgatggtaccgatagagcctgagatgatgatggctacgaaggacgggcggacgggcaaacgatggtgagaggtcgccaccgaggggtgcctttttttttctggtcagatggaacgtcgtcggtctcgagcgccccccgatgtagggccgctctcttacgtatcccgggtcgattcagactgacaaaaagagcgtccagagacgcggtctctttttcttctcgaacggaaagtccgaatcctacacatttctagtcgtgacggctagctttttggtggtcatggcggtggtggtcaacatatatctccagatacaggagatgaggaaaaaaaaggaggacaagtctaacggaataatatccgatcatatatatggagggatatcaggtcatcattgtgtatcaaaagatgatttgtacaacagggaaggatacggttttaaaggttagtgcagagaaactatataaagagcgtataacatggagttcattctgtcattaaaaaggttctaagtagagcatattaaaaatagacgagagctagagttttattcttggttcatcatatattttgtaaaaaaaaatagaaaaatataggtgccggacgccggctacgtcccagtccggggcttagagcacccaaacgcaggtttcccccgttttcaaacacctcaagatcttttgagaaacacatatttttgttatacacagtgaaaacgtggggggacagagttccaaacacgtgtctatcaagcaaaaattcagacgatataaatatggagagttttttcttcttatacaacagcgacagttcggtgtacatagcgtataatatatataggtcacatacagacttatgagctttttaccaaacagatgcaaatcgcctaccggaggcgggatcgggcgtgaggttctggctgcacccgcccgatccctcgtcggcttctccggcggctgtcctaaaatgactaggttcgtatatagagctataggtctttcatgatactgatgagaaatctatggtttgcgcgtcttatctgaatatatctagcacgatatagacgatacacgtcaagatcattgtatcacttcttttcgtctacgtggtaagagtcttggatactaaatatgtatataggcagcatttatagtttcaaaggatagaagatagtttttggacactgatagatatggcgttgttgagcggttgtgttggatgaacttgtcatcattctgtattttttcacataaggtgttcttttcttcgagcagtttataaaaggggtcaggcgcgatgactagagggcgcactttgggtgcggtcctccatcgcttgtcaacaaccggatgtgactcagcgagcacgagatggtttgacgtcagcgaccgttagccctcagggcgaaaacaggaagagtcgcctcgacagcgccctctaggtagcatcacggaacaggcggcgaccgcggactcgcctcggccagggggtaccgaggcggtgcccgcgactcgcccctcctccaagatggcgccgctcggccagactcgtcgagattttcagggctatcattttttcgctctgagcagaaaaaagctcttctaaaacgtctcaaaaaaaagcacagaaaagttatcgtgctatttttttacccgcctggagcaaaaacgctcctaggctctcgacgccattttctctcgtccgccatgtcggagctcagaacggcatgacgagcgagagaaccgtcgagaaggtcaccaagatggcgccggttggggtgcggtcaaacggtgttttacagtttcggggccatttgaacagagaaaggtggggaattttaagggacacggttttgtcggatgggggagaagatcgcgccctgccgtcatattgtcgtctcgatttttttcggccgtctgcacccgtatcggttcacgggttttccacggcaaaatcggagaagggaaaaaaaggtggggcctgttcccttcccgggtctcggacgagtcgacacgccgggtgggacggtcgtggtctcctcggcccgtgccgggaccctccccgtggattcacggtgttccggacccctccaggaaagggtggaaaacgcgtggagcccacggggacgtgcgttcgtgccggggaaaaaacccgactgggcctgaaccaacgttgggtgacctgccgggcccatcgtgtggggacggtgattgtggaggggcgtactgacgacaattgaggtgtcatggcggcccaccgtcgaccccgagcgcttccggccacacccaacctcgccgccgcatcggccagcacacacgccacagcctggtggggtccgaggcgccgaccccggctgggcggccgatggggggaggggagtgggggaccacgcccagggccagcaagccgcgacggttcgggcggagtttttttggggagcagcgggggaggggagcgtcacgggacaggccaacgcccaggataaggcggaccgagagccggcggctaggccgagggacccccggtcacgactggcggccggaccctcgagaggggggaggggagcccaaccggagccgccgagagggagccgccgcgagacccggaagccgtcgcggtcgaccccgctcccggagctcctgaccgggcccccagcccccaaccttccgggaccgattgccgtcgagccggggcgtcgcccgtccccaccaccgtccacccggcccacctaccgtcgtcgtcggccgaccgccgcgacccccagccggaaaaaaaaagcccgcaggggcccaaaagccagcaaggcgggccgggaaggggagctgggtgggggatccccggtcgcccaccgcggaacgagcctaggaaccggggtccgcgacccagccccccgtggggggaggggaagggcgcgacccggtcccgtccattccgcggcgggtggaccggaagccggcggaggtcgccgggagcagcgagggatcccgggccggagcccggggaggagcggggtgggggtgggaagcccccgctcgggtccccccgggccacggacgggaaccgggaccccggtgcgggggtcccagcccggccgggccgtcggatgggggggtcgagcggggggaggggagggacccccggccgaggtccggagcgggccgcgcccggtgcccggcccacggccccggatggtgctccagggcggtgggacgggcccgcggacggaccggcgccgggcctcggccgggggggtcgagcggggggaggggagggacccccgccgaggtccggagcgggccgcgcccggtgccccgcccacggccccggatggtgctccagggcggtgggacgggcccgcggacggaccggcgccgggcctcggccgggggggtcgagcggggggaggggagggaccccggccgaggtccggagcggccgcgcccggtgcccggcccacggccccggatggtgctccagggcggtgggacgggcccgcggacggaccggcgccgggcctcggccggggagggtggggggtagggcgggaggcaggcgggagcgggcgcagcgtgcggaccgcagcacggccggaaccctgccgcggactgcgccggggggcggcgggcacgccgggttttataggttttcagatgccccgcctaggtgggcggagcggtaattttccaccgccgcggcccatgcccggcacggggctcgcgctccctaggtgcggccgcccagtggaaaaataccggcgcatgcgcacggcgcacatctagtggaattttaccgacgcatgcgcactgaccgcctctagtggaaaaatactggcgcatgcgcacgacacacacagtggaattttaccggcgcatgcgcagggcgaccctcccgcgggccctggcccgcgcatgcgccccggggcccctggttcacccctccttatatataggttttccatgcggcatccccggcgcatgcgcactcgagtcaccatcccataatccgcgtggcaacgccctgacaaccaaaaactcgccccgactgcgcatgcgcacggaaacgccgtcccattggaaatcatggttgcccaaatttggtaaaaatttgccccccccggttccggaggagaagggggggggtgaggggggggggttacggtggttcccgttccgccagtccgttttcgtagaacgtttcgttagaagaattatgctatatagggtatgcatcctaggggtggaagctaggctccgcccctacggggcgtcgcctagcatccggtatacgtaaaacggactgatgacgtagctcgcttcgctcgctacgtcatcagagatgatttccgccggagatgacgcacgcatacgtgacgtagctcgctacgctcgctacgtcaccgtatgtccggaattccacaggatgacgtatatccggagtgggtgtggtcacgcgagtgtgacgtaggcttgtcaggggtcacgtgagaagcggcggcgttaagtttactaggccaaaacagaggaagggggcggataccctaggtaagggggcgtgcacgtagccctgtagacactcccccctagggtccagtagcttatgacgcgtatccgggagtagcgtctacgtcagcaggtgtatatttccggtagacggagaagcctgtacgtacaccgaggacggtggaaccctaacgggttccacctatctgaaatttccgtacaaggggtggagtctagggaggggtcattgtatatccgtttctgtgattggtagataaggtggcgtacctaggggtgtggctgtatacgtaagcggatatggctacacgtaatgggtgtggcttcactagggatcgctgtattctaccgcgcgcgtgcgtgcgcgcgcgtgacgtaacaaatcaccttgtgattatgacgttggcatctggcaccgcctcttgggcggttctacgggcctcgcttcctgcgctgatggtcacgtgaccaacaaaagtgctcaccgcctcgccggccacggggttgatgcctgttcttatgccgacaccagatggcgctcgttgaccaggaaagctgtctacgcgggttttacagtgtgtttttgcgtcattgtgacgtagagccggcgatcgccacattcgatggtgtacgctcgccgccagatgtcgtcagattgtacccaaaaccccgttatgattacacgctggcttccgcattcttgggcacggcggtttcaggttacattacatcaagacgcgacaacgccccgaataaaaacaccgggcaccgttatgtatacacgacgtcgatactgatcgccgtagtgacgtcagtcgacacacaacaccgttccccatcacggtgtttcatggcaatgggcgaaagttactttttacaagacgaaaaatgtgttttttggtaaaaagagggggatgggaaaataaaaacacacaattttaaagttcggatcttttcctgttttattgactcgtaaactgtaaggtcttcgagtacgtgtcgggggtctgtgccgcgtacgtgttcgggaaaccacgttacgcggtttgtgtcgtgttgtgacgttgagataacacacaggtttggcgcccgtaggcgcgcgggtttttggggtgtgtagcttgtacggcgttttgtcggcggagcgcagcgaaaatcggtggtgatagcggcgattgaggttgcgagaccagattcatcgcgcttgtaccaccgtggtgcggtgtttctgcttgtaaaccgtcaggcggttctttgtgatttaaaaacaccgtgttcgtgaaacgtgacttttcacggtttgttagctgatgtgattttggaggtcacaaacaccgtacggtgttttcggggatcgggattgggatttgcctgtgtatacgggtgacggtaggacagaaaacgccgttttctagggacggtgttttcacgtgccctgtgtggggtttttatgtgctgcttgtgcgactgagtgggaaaacggattgtgatcggacggtgtgctgaggataaacgacgtgctcgactaccgacgttagttggcggtgacgcaaagccgtcccgaacatcacgctattttcgcgggcgggtgcgtcggctagcggtctggctgcgagaggctacctgaccgtagcggttagcttttcttacgaattgctgggatcgttgcggttgtcgcctttggtggtccgcaaccgcagccagaccgcagtggtggccacggtggtgtctcagacgtcgtgcgtcaaacatgacgtgctgaacttttccttggtataaaattcactcagtggcggcgtagccattgtcttccgttcatccaccatgagccacgaggaactaaccgcgctagcgccggtggggcccgcggcttttctctacttcagcaggttgaacgcagaaacgcaggagattctggccactctctcgctatgcgaccgttcctcgagcgtggtgatcgctcctttgttggcggggctcacggtggaggcggatttcggcgtctctgtgcgcacgcctgtgctttgttacgacggcggggtgctcacgaaagtcacgtccttctgtccttttgcgctctactttcatcatacgcaaggcatcgtggcttttaccgaggatcacggagacgtgcatcggctgtgcgaggacgcccgccagaagtacgcgttggaggcttacatgcccgaggcggatcgcgtgcctaccgatctggcggcgttgtgcgcggcggtgggctgtcaggcgtccgagacgactgtgcacgtggtggtgggcaacggcttgaaggagtttctctttgccggtcagctgattccatgcgtggaggaggcgaccacggtgcgactgcacggcggcgaggcggtgcgcgtgccgttgtacccgcctacgctctttaattcgttgcagcttgacgccgaagccgacgaggtctcgctggatgcgcgcagcgcttttgtggaggcgcgagggctctacgtgccggccgtaagcgagacgcttttctactacgtgtacacgtcatggtgtcaatcgctgcgcttctcggagccgcgtgtgctgatcgaggcggcgttgcggcagtttgtgcacgacagtcagcagtcggtgaagctggcgccacataagcgctacttggggtacatgagccagcgactcagcagtctggaaaaggatcatctgatgctgagtgacgcggtggtttgcgagttggccttcagttttgcctcggtatttttcgattcggcttaccaacctgccgaatctatgctcttttccgagtggcctttagtgaccaacgcaaccgatcaccgcgatctgatccgcgcgctgaccgagctcaagttgcatctctcgacgcacgtggccgccttggtcttcagcgctaattcggtgctctaccagcacaggctggtgtatctccagtcgtcggcgcggcatcccagcgccggcggtacggccagtcaggagacgttgctcaaggctattcagttcaccaacgggttgtcggcggcctgcgaagacgtctacaacgacgcgcgcaaggtgctcaagtttcagggcgcgccgctcaaggacgaacgctatgggccgcagcatttggcgttggtgtgtggcacgtgtccgcagctagtttcgggcttcgtctggtatctgaatcgtgtctcggtgtacaacacgggcttgtcgggttcgtcgacgctcacgaatcacctggtgggctgcgccgcggggctgtgcgaggcctgtgggggtacttgttgccacacgtgttatcagacggccttcgtgcgggtgcgcacccgcttgcccgtggtgcccaagcagcccaagaaggagccctgcgtgatcaccgtgcagtcgcgttttctcaacgacgtggatattttgggcagcttcggtcggcgttacaacgtcgacgccaaggacgggggtttggacggcaaaggtgacgacggggttccgggcggcggtgctggcgggggtggtggacgagacgtgagcgggggcccgagcgacggtctgggtggcggtcgtggtggtgggggtggtggggattccgggggaatgatggggcgcggcggtcgcatgttgggcgctagcgtggaccgtacctatcggctcaatcgcatcttggattactgccgcaagatgcggctcatcgaccccgtgacgggcgaggatacctttagcgcgcacggcaaaagcgactttgtggccgtcttttcggcgctcaacaagtttgtggacgacgaggccctgggtttcgtttcggaggtgcgcctcaagagcagccgcgacgaggtggcgggcgccacgcaggccttcaacctggatctgaatccctacgccgtggccttccagccgctgctagcctacgcctatttcagatccgtcttttacgtgatccagaacgtggcgcttattaccgctacctcatacattgtggacaatccgttgaccaccaacttggtatccaaatggatgacgcagcattttcaatccattcacggcgcgttctccaccacgtcgtcgcgcaagggctttctcttcaccaagcagatcaagtcgtccaagaattcggatcacgaccgcctgctggactttaggctgtacgcgcagggcacgtacgccgtggtgcccatggagatcaagctctcgcggctgtcggtacccacgttgatcatggtgcgggtgaaaaaccgacccatctaccgcgcgggcaagggcaacgcgggtagcgtgttttttcgccgcgatcacgttccgcgtcgtaatccggctaagggctgcttgggatttctgctgtatcgacatcacgagcgactctttcctgaatgtggtctcccctgcttacagttttggcagaaggtctgttccaacgcgttgcccaagaatgtgcccataggtgacatgggcgagttcaatgctttcgtcaaatttctggtggctgtgacggctgactatcaggagcacgatctgctggatgtggcgccagactgtgtgctgagttacgtggaaagccgtttccataacaaattcctctgctattatggcttcaaagactacatcggctcgctgcacgggttgacgacgcgcttaacgacgcagaaccacgcgcagtttcctcacgtgttaggtgctagtccgcggttctcgtcgcccgccgaatttgcgttgcatgtcaagggcttgaagaccgcaggcgtgccggcgcccatggccgccactgtggcgcgtgaatcgttggtacggagcgtttttgagcatcgttccttggtgaccgtgcccgtgagcgtggaaaaatatgcgggtatcaacaacagcaaggagatctatcagtttgggcagatcggctacttttcgggcaacggtgtggaacgcagccttaacgtgagctctatgagcggccaagattatcgtttcatgcgccagcgctacctcttggctacgcgtctggccgacgtgctcatcaaacgctcgcgccgcgagaacgtgctttttgacgcggatcttataaaaaaccgcgtcatgctggcgctggacgccgagaacttggattgcgaccccgaagtgatggccgtgtacgagattctgagcgtgcgcgaggagatccccgcgtccgacgatgtgctcttcttcgtggatggctgcgaggcgctggccgcgtcgctgatggacaagtttgccgcgttgcaggagcagggcgtggaggacttttcgctggagaacttgcgacgcgtgctggacgccgacgcccagcgattaacggacgccgccgggggggaggtgcacgacctgtcggcgctcttcgcgcccagtggcgtcggcgcggcgtccggcgtcgggggtggcggtcttcttctcggcgagtccgtcgcgggcaactccatttgcttcggcgtgcccggcgagacgggaggtggctgctttctcgtgaacgccggcgaagacgaggctggcggcgtcggcgggagcagcgggggcggcgggggcagcgggttattgccggccaaacgcagccggttgtaaccgccagcaaacgccgcgacaacggccgccgcagccacgagcatcgcaacaacagcaacaacagtcgcagcccccgtggccgcttttcagaccgcaacaacagcagcaacagcagccaccgacacagcagcaccaggcgacaccgtatcagctaccgccgcaacagcggcgacagacggcgtcgcatcatcaacagcagcaacagccccgaaggttagcgccgcggcaccagagacagagaccgccgccgcgctggcaaactccgacattcgcgtcggcgcccgggccgcctgaggaaggggaggagtgtcagacacagccggtcatctccgagcccccgtcgcccgaggcggaggagccggcggcggcggtggtggaggaggttgcgccgcaagcggcggcaacagcttcgggagcagaacccgcgtcgtcgacgacgtcgttatatattaacgtcaacgtcagtcggcatagcgagcggcccgcgagttatttgtgcaccgactccatgtctctggccggcgccagaccggacgacagcgtctcgtacgtgagcgagtcgagtcatggagatgaatttgttacagaaactatgcgtagtgtgttcgaaatgcaacgaatacgccatggagctggagtgtctaaagtactgcgatccgaacgtgttactggcggagtccacgccgttcaagagaaacgcggcggctatagtgtatctgtaccggaagatctacccggaggtggtggcgcagaatcgtacgcagagttcgttgctgacgctctacctggagatgctgctgaaggcgctgcacgaggatacggctttgctggatcgggcgctgatggcctactcgcgccagccggaccgggcggccttctaccgtaccgtcctccgtttggatcgctgcgatcgccatcacaccgtggagctccagtttacggacaacgtccgtttcagcgtcagtctggccacactcaacgacatcgagcgcttcctgtgcaaaatgaactacgtgtacgggatcctggcgccggaggccggcctggaggtctgcgcgcagttgctggagctcctccgtcgcctatgcggcatctcgccggtggcgcgtcaggaagtgtacgtcgaagggacgacatgcgcccaatgctacgaggagctgaccatcatcccgaatcagggccgctcgctgaacaagcggctgcagggcttgctgtgcaaccatatagcggtccaccgtccgtcaagccagtccgatgtgaatatccagacggtggagcaggacctgctggacctgacaacgcgcatcccccacttggctggagtcctttcggccctcaaaagcctattctcttcttcatcggcctaccacagctacatccaggaggcggaggaggcgctgagggagtacaacctgtttacggatataccggaacgaatatattccttgtcggattttacctactggtcccgtacctcggaggttatcgtcaagcgggtgggcatcaccatccagcagctaaatgtgtatcaccagctgtgccgggcgctcatgaacggcatcagtcgccatctgtacggggaggacgtggaggacatcttcgtgctcggggaaaaggcgttggacggggaggagcgcatgttcgtggggtcggtctttgccgcccccaacaggatcatcgacctcatcacatccctcagcattcaagctttcgaggacaacccggtgttcaacaagctccacgaaagcaacgagatgtacaccaaaatcaagcatattctcgaggagattcgacgtccgctgccagatggcacggggggcgacggccccgagggcgaggctattcacctgcgtggacgggaggcgatgtcggggacgggtacgactttgatgacggccagcaacagcagcaacagcagtactcacagtcagaggaataacggtggcggcggccgggctcgtggaggaggcaagaaagtggtagggggaggggtgaatgggcaggacggcgacggcagcgagaacggcttacgggtgcgcaactgcgacgaacacgaggctctcgacttggtggacgcgcgctcccgcatccacaacgtcactcgcgaggtgaacgtgcgcaaacgcgcctacctgcagaaggtctcggaggtgggctatggcaaggtgatccgttgcatcaaaacgcaggagcgtctgactagcaagctcatcgatgtcaatctagtggggcccttgtgtctggactttatctctaagctcatgaatgggtttctgtaccgcagccaataccaccaggaccaagacgtggtggacgtgggtgatcagttcacctacgatgagcacctgtatgtggtcaataacctgatccacaagagtctgcctgtggaatccctcccgctactgggtcagcagatctacgagttgtgtaacgggcccctcttcacccactgcaccgatcgttatcccctctctcacaatgtggacatggcctatgcctgcgacaacgcgggcgtactaccccacgtcaaggacgatttggtcaaatgcgcggaaggtaccgtgtatcccagtgagtggatggtggtgaagtatatgggttttttcaatttttcggactgtcaggacctaaacgtgctgcagaaggagatgtggatgcacgtgcgggagctcgtgctctccgtcgcactatataatgaaactttcgggaaacaactctcgatcgcgtgcctgcgcgacgaactgcacccggacagagatgtgattctcacgtataacaaagagtggccgctgctgcttcgtcacgaaggaagtctttataagtccaaagatctatatctcctcctctacaggcatctgtccagaccggatgagagtggcgacgtgccaacagctcccgtggccaagccctccaccctgacggccgccgcggccgtctcgggtgtcttcagggagccggaccgaccttggctgccaagtccgtatccctcctcctcgactgcgggtgtttcccggagggtccgcgcgacacgcaagagaccacgacgcgcctcatcgctgctggatttggcccgcgacgaacatggaatccaggatctggtgcctggtagtctgcgttaacctgtgtatcgtctgtctgggtgctgcggtttcctcttctagtacttcccatgcaacttcttctactcacaatggaagccatacttctcgtacgacgtctgctcaaacccggtcagtctattctcaacacgtaacgtcttctgaagccgtcagtcatagagccaacgagactatctacaacactaccctcaagtacggagatgtggtgggagtcaacactaccaagtacccctatcgcgtgtgttctatggcccagggtacggatcttattcgctttgaacgtaatatcatctgcacctcgatgaagcctatcaatgaagacttggatgagggcatcatggtggtctacaagcgcaacatcgtggcgcacacctttaaggtacgggtctaccaaaaggttttgacgtttcgtcgtagctacgcttacatctacaccacttatctgctgggcagcaatacggaatacgtggcgcctcctatgtgggagattcatcacatcaacaagtttgctcaatgctacagttcctacagccgcgttataggaggcacggttttcgtggcatatcatagggacagttatgaaaacaaaaccatgcaattaattcccgacgattattccaacacccacagtacccgttacgtgacggtcaaggatcagtggcacagccgcggcagcacctggctctatcgtgagacctgtaatctgaactgtatgctgaccatcactactgcgcgctccaagtatccttatcatttttttgcaacttccacgggtgatgtggtttacatttctcctttctacaacggaaccaatcgcaatgccagctactttggagaaaacgccgacaagtttttcattttcccgaactacaccatcgtttccgactttggaagacccaacgctgcgccagaaacccataggttggtggcttttctcgaacgtgccgactcggtgatctcttgggatatacaggacgagaagaatgtcacctgccagctcaccttctgggaagcctcggaacgtactatccgttccgaagccgaagactcgtaccacttttcttctgccaaaatgactgcaacttttctgtctaagaaacaagaagtgaacatgtccgactccgcgctggactgcgtacgtgatgaggctataaataagttacagcagattttcaatacttcatacaatcaaacatatgaaaaatacggaaacgtgtccgtcttcgaaaccagcggcggtctggtggtgttctggcaaggcatcaagcaaaaatctttggtggaattggaacgtttggccaatcgatccagtctgaatatcactcataggaccagaagaagtacgagtgacaataatacaactcatttgtccagcatggaatcggtgcacaatctggtctacgcccagctgcagttcacctatgacacgttgcgcggttacatcaaccgggcgctggcgcaaatcgcagaagcctggtgtgtggatcaacggcgcaccctagaggtcttcaaggaactcagcaagatcaacccgtcagccattctctcggccatttacaacaaaccgattgccgcgcgtttcatgggtgatgtcttgggcctggccagctgcgtgaccatcaaccaaaccagcgtcaaggtgctgcgtgatatgaacgtgaaggaatcgccaggacgctgctactcacgacccgtggtcatctttaatttcgccaacagctcgtacgtgcagtacggtcaactgggcgaggacaacgaaatcctgttgggcaaccaccgcactgaggaatgtcagcttcccagcctcaagatcttcatcgccgggaactcggcctacgagtacgtggactacctcttcaaacgcatgattgacctcagcagtatctccaccgtcgacagcatgatcgccctggatatcgacccgctggaaaataccgacttcagggtactggaactttactcgcagaaagagctgcgttccagcaacgtttttgacctcgaagagatcatgcgcgaattcaactcgtacaagcagcgggtaaagtacgtggaggacaaggtagtcgacccgctaccgccctacctcaagggtctggacgacctcatgagcggcctgggcgccgcgggaaaggccgttggcgtagccattggggccgtgggtggcgcggtggcctccgtggtcgaaggcgttgccaccttcctcaaaaaccccttcggagccttcaccatcatcctcgtggccatagccgtagtcattatcacttatttgatctatactcgacagcggcgtctgtgcacgcagccgctgcagaacctctttccctatctggtgtccgccgacgggaccaccgtgacgtcgggcagcaccaaagacacgtcgttacaggctccgccttcctacgaggaaagtgtttataattctggtcgcaaaggaccgggaccaccgtcgtctgatgcatccacggcggctccgccttacaccaacgagcaggcttaccagatgcttctggccctggcccgtctggacgcagagcagcgagcgcagcagaacggtacagattctttggacggacagactggcacgcaggacaagggacagaagcctaacctgctagaccggctgcgacatcgcaaaaacggctacagacacttgaaagactccgacgaagaagagaacgtctgaaccaggaggaaaaaaaaactagacaaaaaatattgacacagagacttgtgatatacggggttaaactggatatctaggtgctgcatgtgtattttctttgtgattttgcttcgtaagctgtcagcctctcacggtccgctatgtttttcaacccgtatctgagcggcggcgtgaccggcggtgcggtcgcgggtggccggcgtcagcgttcgcagcccggctccgcgcagggctcgggcaagcggccgccacagaaacagtttttgcagatcgtgccgcgaggtgtcatgttcgacggtcagacggggttgatcaagcataagacgggacggctgcctctcatgttctatcgagagattaaacatttgttgagtcatgacatggtttggccgtgtccttggcgcgagaccctggtgggtcgcgtggtgggacctattcgttttcacacctacgatcagacggacgccgtgctcttcttcgactcgcccgaaaacgtgtcgccgcgctatcgtcagcatctggtgccttcggggaacgtgttgcgtttcttcggggccacagaacacggctacagtatctgcgtcaacgttttcgggcagcgcagctacttttactgtgagtacagcgacaccgataggctgcgtgaggtcattgccagcgtgggcgaactagtgcccgaaccgcggacgccatacgccgtgtctgtcacgccggccaccaagacctccatctatgggtacgggacgcgacccgtgcccgatttgcagtgtgtgtctatcagcaactggaccatggccagaaaaatcggcgagtatctgctggagcagggttttcccgtgtacgaggtccgtgtggatccgctgacgcgtttggtcatcgatcggcggatcaccacgttcggctggtgctccgtgaatcgttacgactggcggcagcagggtcgcgcgtcgacttgtgatatcgaggtagactgcgatgtctctgacctggtggctgtgcccgacgacagctcgtggccgcgctatcgatgcctgtccttcgatatcgagtgcatgagcggcgagggtggttttccctgcgccgagaagtccgatgacattgtcattcagatctcgtgcgtgtgctacgagacggggggaaacaccgccgtggatcaggggatcccaaacgggaacgatggtcggggctgcacttcggagggtgtgatctttgggcactcgggtcttcatctctttacgatcggcacctgcgggcaggtgggcccagacgtggacgtctacgagttcccttccgaatacgagctgctgctgggctttatgcttttctttcaacggtacgcgccggcctttgtgaccggttacaacatcaactcttttgacttgaagtacatcctcacgcgtctcgagtacctgtataaggtggactcgcagcgcttctgcaagttgcctacggcgcagggcggccgtttctttttacacagccccgccgtgggttttaagcggcagtacgccgccgcttttccctcggcttctcacaacaatccggccagcacggccgccaccaaggtgtatattgcgggttcggtggttatcgacatgtaccctgtatgcatggccaagactaactcgcccaactataagctcaacactatggccgagctttacctgcggcaacgcaaggatgacctgtcttacaaggacatcccgcgttgtttcgtggctaatgccgagggccgcgcccaggtaggccgttactgtctgcaggacgccgtattggtgcgcgatctgttcaacaccattaattttcactacgaggccggggccatcgcgcggctggctaaaattccgttgcggcgtgtcatctttgacggacagcagatccgtatctacacctcgctgctggacgagtgcgcctgccgcgattttatcctgcccaaccactacagcaaaggtacgacggtgcccgaaacgaatagcgttgctgtgtcacctaacgctgctatcatctctaccgccgctgtgcccggcgacgcgggttctgtggcggctatgtttcagatgtcgccgcccttgcaatctgcgccgtccagtcaggacggcgtttcacccggctccggcagtaacagtagtagcagcgtcggcgttttcagcgtcggctccggcagtagtggcggcgtcggcgtttccaacgacaatcacggcgccggcggtactgcggcggtttcgtaccagggcgccacggtgtttgagcccgaggtgggttactacaacgaccccgtggccgtgttcgactttgccagcctctacccttccatcatcatggcccacaacctctgctactccaccctgctggtgccgggtggcgagtaccctgtggaccccgccgacgtatacagcgtcacgctagagaacggcgtgacccaccgctttgtgcgtgcttcggtgcgcgtctcggtgctctcggaactgctcaacaagtgggtttcgcagcggcgtgccgtgcgcgaatgcatgcgcgagtgtcaagaccctgtgcgccgtatgctgctcgacaaggaacagatggcgctcaaagtaacgtgcaacgctttctacggttttaccggcgtggtcaacggtatgatgccgtgtctgcccatcgccgccagcatcacgcgcatcggtcgcgacatgctagagcgcacggcgcggttcatcaaagacaacttttcagagccgtgttttttgcacaatttttttaatcaggaagactatgtagtgggaacgcgggagggggattcggaggagagcagcgcgttaccggaggggctcgaaacatcgtcagggggctcgaacgaacggcgggtggaggcgcgggtcatctacggggacacggacagcgtgtttgtccgctttcgtggcctgacgccgcaggctctggtggcgcgtgggcccagcctggcgcactacgtgacggcctgtctttttgtggagcccgtcaagctggagtttgaaaaggtcttcgtctctcttatgatgatctgcaagaaacgttacatcggcaaagtggagggcgcctcgggtctgagcatgaagggcgtggatctggtgcgcaagacggcctgcgagttcgtcaagggcgtcacgcgtgacgtcctctcgctgctctttgaggatcgcgaggtctcggaagcagccgtgcgcctgtcgcgcctctcactcgatgaagtcaagaagtacggcgtgccacgcggtttctggcgtatcttacgccgcttggtgcaggcccgcgacgatctgtacctgcaccgtgtgcgtgtcgaggacctggtgctttcgtcggtgctctctaaggacatctcgctgtaccgtcaatctaacctgccgcacattgccgtcattaagcgattggcggcccgttctgaggagctaccctcggtcggggatcgggtcttttacgttctgacggcgcccggtgtccggacggcgccgcagggttcctccgacaacggtgattctgtaaccgccggcgtggtttcccggtcggacgcgattgatggcacggacgacgacgctgacggcggcggggtagaggagagcaacaggagaggaggagagccggcaaagaagagggcgcggaaaccaccgtcggccgtgtgcaactacgaggtagccgaagatccgagctacgtgcgcgagcacggcgtgcccattcacgccgacaagtactttgagcaggttctcaaggctgtaactaacgtgctgtcgcccgtctttcccggcggcgaaaccgcgcgcaaggacaagtttttgcacatggtgctgccgcggcgcttgcacttggagccggcttttctgccgtacagtgtcaaggcgcacgaatgctgttgagaaacagcggcggcggtggtgactggggacggtgatgatgctgctgagactgagactggtggtgagagtagtggtggggctgcgtcgcctgcgacggcgggtggagatgaggcggcgtggactgggacgaggaggaggggccgcagccgttggtggaaactacgtgcaacggcgacgcggttaagggagaccgtatcgcgtaggacgacgtggcctcctcgtataggttgttgccgctggactgacacagctcctgaatgagctctttgtagcgctcaaaggactcgctcacgtcgttgggaatgtccatctcgtcaatcttgcgttgcaaaatagtcacgtcgatcttgacgctgctggccgagacggcgtgacacagcacgctgataacgacgtggtcgcgcacgatgttgagcgtgacgctgtagtcttcgcgcgccgccgtgagcatctgcgtgatgcagtcgcaggggatgtgcacgtcggggttttcgaagatgacgtgcatgtgcaaccggccgtcctcggcgtgcataaagggcacgatgtcgtggttggcggcgtgcagcaggtaataaatttggaagatgggcggctggttggtggagagcttgagtagctcgctgctcttacagaacccgtaataaaagtttctatttttcatgatgttggacgtctgattgatgaaggccaccatggcgtcggaggcggtgggcaggatgcggttgtcctcgcacgaggtgcaggcgatgcgcgagacctgctcgttgccgtacggcgagatgtcgaggcaggtgtgctgccggtgcgagtggaaattgaagggtaagcagatggactctttgcccgtgatggccatcttcatcatgttaaggtacttgagctccagttcggggtgctcgcggaagatgtcgtgcaggtcgtgcagcgtgaggcgcgggcgcgcgtcggccggcgacggcggttcgccgtggttgttggccgacgtagcgccgttcaccgtcgacgccactttgctggccagctcgcgttggcggcgcttgcggagcagggagcgcaaggccgagcgtcgttcgcgcggcgtgcgcacgccgctcacgctagacatacttgtctatcacgtacgtggggtccaccagcttgatgtcgcaactctccaacagctgcgtgaaatcgcgcataaagtccgccaggtgcactttgcctttgtaggtgcgttttgtaatctgaaaggccttgaagagtgtgatgcagagccacacacgtcgcggaagtcgacttatatagtaattgtcgtgacagatggccagtttcacctcctggacgtggtgggggtgcaggcgtccgaagagcacggcctcgttggtgacgcggatgttgccggcgcactgcgggtcgcagaaaaagtgcttgtagatgcccgtgacgcctgcctgacgcaggacgtggcaaaataccgggtcgggtcgcgccagtgcgccgtcgacgccgctcaggccgtggtagtccgagtcgcctccgggcgaggtgggtgcttcgagtccacagcgcgccacgtcctcgtgtgccgcgccgagcggcgacgtgcattcgcgcaacagatcggccaataccagctgaatgcggtccaccatcttcacattgttctgacaatacgagacgacgcggcggtacagctcgcgcaggacgacgttatcgtaataggagcaggccatgagttcgcacagcagacacacggtactggtttggttcttggtaaaaaaagcgggtacgggacataggtaaatgggacccacgtttttttttagcgtgctctcgctgaaccccccgctggtgccaccgccgttgtgacggcccggatcgtctcctcctttttctcctccttcttcatcctcctcttcttctatcatcatccttgcgtcttctctttccgaggccgtggataacgcgtctagtcgcgcgaacttagtgtgcgtgagttccgtgagtggcgtggtgctcatgacgccggtgccggcccacatatagaaaagcagctgcacgaagcggtcgcggctaggtgagctgtgttctagaaagttgtcgatcagttcttgcggcacttcgacgtgataagggttgtttttttgcttctgttgcgggtggcgccgaggcttgttgtaaggcaccgtgtcttcacccatgaccatggcccgcaccacggccagatggttcagggtgacattctcgttatcaaccgcgtcgcccacttgtttttcaaagcaacgattgatgaaaaagtgcaggtggaaatcgaagaccgtgagaacgtggtgtcggaacaggtcgtcgatgcgcagatcggaaaagtgctgctgcagcagatgcgtaaactcggacatgatgatgagcgtgctgagcgccgcacggggcgcgtaactgcatttgaagcacagcaagctgtactcgaggagccagctctggtcgcagtcctgtttgaggcagatgctgatgatggcgcataggttacagcgcgtgtcgatggccagcggcgcgcacagtcgccgcagttgttcaaagtcggccgccgaggtttcgaggccggccagttctgcatctaggtcgcaggcggccgaagcgccggcgggtcctacgttgctactgccggcgacggctccgccgcagctagtggtgttggtcgcattggtgagtacggtggattgcgtgccgccgcacgtggtttcttccgcacaacagttgagcagttcgtctacctccgaggtgccgaggctgagcgtctggaattcgtaatgacggtaacggttggcggggtgttgaggatttacctggtatgaggcggccgccgcggcggccagcgcttcgtccataggtacttgacgcgggtgcgcgtgccatagcagctcagttgtcaagtccgagtgccactgggtgtactcggtgctccagccgctgtaacgcgaaacggcctgtcgttgcggactgcacaaggtagcggcggcgacggagctggtggacggggccgggctggtcgggggaagaaacgtggtgtggggcccgtgagggggagtcgttgggccgttactgctcacgtgggtactcggattcatggcgatcggcgccgctgattgaggacgcggaaaaaagaatgtcctgggctaagcagcgggtgccgtttctggacgatgacgacggagaggaggaaaacgacgtgcaggatgacgtggattctccggtgccgacgcgaccgctggtgatcgacgaggacgcggagcccgcggctggtacgagcggtgggctcgaggggggaggtggtgacgacgaggacggtgaagacggacacgcgctacccgatcttgacgacgatctgctattacagttcgagccgatgctgccgcgcgtctacgatctgttgctgccctctctggacgcgcgcttaaatttcgtgaacgcgggtcagaagtacgccgccttcctcaagtacgtgcacggcgactgcgcgacctgcagtcacggagagatcctccgtgagaagacgcaactattaacggcgatcgtcagcaagctcatggacattaacggaatcctggagggaaaagacgagtcggcgccgggtaaataaatcggcggtggcgtcggtgcgatggagatgaacaaggttctccatcaggatctggtgcaggccacgcggcgtatcctcaagttgggtcccagcgagctgcgcgtcaccgatgccggcctcatctgtaaaaaccccaattactcggtgtgcgacgccatgctcaagacagacacggtctattgtgtcgagtatctactcagctactgggagagccgcacagaccacgtgccttgttttatctttaaaaacactggctgcgccgtctccctctgctgttttgtacgagcgcccgtcaagctcgtttcgccggcgcgccacgtaggtgagttcaatgtgcttaaggtgaacgagtcgctcatcgtcacgctcaaggacatcgaggagatcaagccctcggcctacggagtgctgacgaagtgcgtggtgcgcaaatccaattcggcgtcggtcttcaacatcgagctcatcgccttcggacccgaaaacgagggcgagtacgagaatctgctgcgcgagctgtacgccaagaaagccgcgtcgacgtcgttggcggtccggaaccacgtcaccgtaagcagtcacagcggcagcggtccgtccctgtggcgcgcccgcatgtcggccgcgcttacgcgaacggcgggaaagcggtcctctcggaccgcatctccccctcctcctcctcgtcatccgagttgctctcccaccatggtcgccgctggcggcgccgctgccgggcctcggccgccgccgccacccatggcggcggggtcgtggcggctgtgtcgttgtgaggcctgtatgggacgatgcggatgcgcaagcgagggagacgctgatgaagaggaggaggagttgctggctctggcgggagaagggaaggcggcagcggcagcggcgggccaggacgtcggagggtccgcgcgtcggcctctggaggagcacgtgagtcgtcggcgaggggtgtcgacccatcaccgtcatccgccgtctccgccgtgcgcgccgtccttggagcggactggttatcgttgggcaccgtcatcgtggtggcgagcgcgctccgggccatcgcgaccgcagtctgggccgtggctgcccgcgcgctttgcgactctgggcccgctggtgctggctcttctgctggtgctggctctgctgtggcgcggtcatggccagtcgtcgtctccgacacgctccgcacaccgcgactgatgagttccaccaggctctgcgccgtctcttcgcgcccctctgcgttcacgaggaccatttccatgtgcagctggtgatcggccgcggtgcgctgcagccggaggaagcggcggtagaaacgtcgcagccaccggcgcagtttgcggcgcagacgtcggcggtcctccagcagcagctggtgcatcacgtgccacgttcttgcgtccttcatctcttcgtgacggataagcgctttctgaatcgcgagctgggcgaccgtctctaccaacgcttcctgcgcgaatggctggtgtgtcggcaagccgagcgggaggcggtgacggcgctctttcagcgtatggttatgaccaagccctactttgtgtttctcgcttacgtctacagcatggactgtctgcacaccgtggccgtccgcacgatggcctttctgcgtttcgaacgctacgacaccgactacctgctgcgccgtctgcggctctacccgcccgagcggctgcacgcgttgttggacggtgtcaccgcctcgctgctaggtgaccttcaccgtttccttttcggggtggaccttcggctgcccgtgcttcaccccaccagctcgccgtgcctagcattactacgcgccaagcgcttcgacgcccgcgctgatttggccgtataccaccgtaaccagtggtgtcaccaacggcagccgcggtcgccgcagttgcggggcctcatcgcagccttgcgccggtacgccgggaaggtaccctgcggaaacccgctctacgtactggcccgacaagcggtgcagacgttttgcgacacgtgtccgcgatacctggtgccgttgcgggcactgggtctgcacgacgagacgcgcggaggaggctcgacggcggcagctgcggcggtaggacacgcgggcgccggacagcaggcgcgtcacgtagagcccaccaagatcgtcctctttgcactcagcgccgcgctgcgcggcggcctcatcggcagcgtcatcgacctgccgctctggtgtctgtgtcgactcaagtgcgagcgccatctggacgcgcgctcgctggtggccgtggtctgtcggcagtgcggacactgcctcaacctgggtaaggaaaagctacactgccagcaaaactttccgctcaactcgatgttctattatcgggaccgtcaagaaaagagcgtcatcttcaacacgcacgccgagctcgtgcactgctcgctctgcggcagtcagcgggtggtgcggcagcgcgtctacgagctcgtctccgagacgctctttggacagcgctgcgtacgcgtgggctggaaagccgtgctgggcctcaacgcggcttgtgccgtgtacgatcaccggctggctttcgacgtcattctgccctgcgcggcacgcacctgcgactccactgtggtggtacgcgacgtgacggtcccgcgtctcctgcgcctcacttcgcacgggcacggcctgctgtgcgcgcgctgtcagacgggcgagtaccgcgacagctgtttggaaagcgaggacggcgccccgctgtgtcggggctgcgcgctggttaaacagaccgcctgccacgtcggcggccacattgtgcagcaggcgcgcggcggtttagcagcggcttcctcttcgtcctccccccacggcctgccccatgtctaacaccgcgccgggacccacggtggccaacaagcgggacgaaaaacaccgtcacgtcgttaacgtcgttttggagctgccgaccgagatatcagaggccacccacccggtgttggccaccatgctgagcaagtacacgcgcatgtccagcctgtttaatgacaagtgcgcctttaagctggacctgttgcgcatggtagccgtgtcgcgcacccggcgctgacagcccaaggggaaaaggaatagcaagaataaatcaccgtgaaagtgatacgttgttttgtaacataaaaaaacgataaaaatcctattgtttttattacccgctactgtcagtgtcggttacaaaagatagagaaaccgcatgtgttgaatagtgtcctgtacggattgcgccagttgtcgcaggtccaatcgcactagccgcagtatttctagagcactgaggacgttctgcgtaagcaccgtgataggcggcgaggcgaaactggtgctggcggcgccgggcgccacggccacaagttcatctcggcatagtggtgtttctcccaatcggttttcttgaaagacggacccgccaaaggcggtagagactaatgcagagtcggctgtccttgatgtatcgtcttgtacgtgatctatctgtccgtcgtcgtctgcggccgcggccgctcgatgacgatgtcggcgcggcggctgctgaactcgcgcgatgggtggcgggttttcacgcagaaactgaatattgactggcacgcggttgaaaggtaccggcggtgttggagcggcgccagacgcagcgatgttgtccgcggatgagttatcatcttggtcatacagcgggaaggtggggaaggcctcgtccaacaccagccgactgtggtcctgttcgaacgtggagggcggtcgcagcacgcgtacgacggtgtggtcctgtgcgttgtaaatgactaggggaataaactctaagcgggtggggaaacgcaggtaatcgcgtagccgtctgatttgggcttgtagccagcagtgctccagcggcgtttcggtccacgtgtcctggagcagttgactgagattgagatcccgggagcgttggatgcggaggaagtcgcggtctcgcgacgtgtattcgaggtggcgcgctactagtatacgttggcctttcagcaggtcggctacatgcacgccgagacacacgggtatgccgaaaagccaggagcccagcgcgtagtctagggcggtttctgtttgaataaaaacatctaaaagtcccggctccgtggtcgtgtttgtgtctgtggtggttgtgtcctgacgtggcacgcggatcatctgaagcaccggctctccggtggggagctgcggttgcgtgtacccctcggtcaccatttcgcattgttgcgtgaaaatctgaaacaacgtctgtaccaattcggacaccgaggcgtatgtctcggcgtactggggtttcagttctagccacagacactgcagcatgtcttgtggaaagaccagcgtggccatggcgtagagccatagcttgcctaagggcggtgtgcttttttgcgggcctacctggcacagttgctgtaccagtttattttcccaaaacagtttattgagctgcatggcgggccattgggtgggggtgatacagaaggccttgacctgttcggggaggtggtcggggggcattttgtgtgtgttattgactaccgcgtgtatcacatcctgatgtaggtgagctgtgagggagggtagtgacatctgcaccgggtatttgaggacggtgtagatgtactcggggtacagagccgctatgagtacacaaaactcttgcagactcaggcgcagcacggtaccgcggcccggtctctgttcccctacgtcaccaccctcgccgctgcctacgcgatcggcggccgtcagctcctgctgcgtgtcgatgcgctggtgccaggcggtgctcaccagataacaaaagagcttaaggttatgcaacgtgtgagtctccgcggggtgcgtgtggctctgatgctgcgtgaggtagggtcgtaggtcgtactgcgagatctgtggccagaaagtgcgcaatgtctgacagacggccacggctaccgtgatggctttataacgtgtggtgacgacgttcttgagtcctccgccgctacagcggcgccgccatgccaggggccgaccatcgtctcgcagcgccaagtacttaaaggctacgttgccataatcggtgaccaggtgaatgggttcgccggcctgcgtgacgatttgccgcatgccgaagacgtctaccacttcaaggaaggtgtcgtggtgacgcgcgaagcataggcgacgcaggcggtcgcgcattatcagcgcggggtcggtctcgtgtgttgccggaagcacgctaggaatgtcttccagcctatagactagcgatgagccgttgagcttgttgagcagatactggtgacccagctggacgtgtcgttccagcgcgttcaacccgcgtgtaaaggcgcccagtgaagtcgtcgcctgcggtttccgggggttgggcaggactccctcgttggagagacgcgtgccgcgtcgcttggccagttccgcaaaacgagtccgcagatcgcggatcttttccaactgcgaccgaaagtccagcccgtagctgaaggtctggattccgtgtaacagcgcaaagtattccgtcgccaacgtttcctgcagttctaggtcgcctagcgtctgacccaagcgctgcaacagttcctgcactttttgatgacgcgcggcgccgccggctacgcgtccgggttccagtcgctgccagaccgcttccaccgcctggaccatgtcgacccgcggcgtggacgcgccgttggcagtcgcctcttgatgctgtgcaataaaattttcacaggccgcgttttgttcgatttgatgcgctagcgtcacggcgctctcgacagcttgctgttgcaggttccggtagtgggtcctgcttccgtgatgcgggtgcgtagggtccgcggtgatttgcgcaagggcttcctccagaaaggccagcatccagcgcactgtgcgttccgccgacaggtacggcagttgttgcgtggctttgcccaacagctcgcgaagtgtctccagcggcttttccatcagcgccttggcgtcgggggtggtcacgtccagtccgccgctcattttgtggcgcgtgaccagatcagtccacaggttctgcgccgtgctcagctgctcgtcgcgttgtcgcaactgcgtctgtactttctgattcagcagatcggcctcgtcgctgagcgctttccgggccgcgtcggcctgctgatctagcagcgttttgaaaacgggctgctggaagtcggcgggcgggggcgtgatccgacccgccagctcctgacccttgaagggtttctcgggtacacgcgtgacggagctgctcccgggatcctggcgcagcgagcgatctagccgctcgctagtctcggtcatctgttgtctagtctcttgtaattgttcctccatcttctgttgactgctgcggtagcgtgcaaagtcgccctcgaactcgctgcccgtgatggctgtagttggatcgccctgttgacacttctcgatgaactgcgcttgatggacggcgtgttgcagggcctgctgcgtctcatggatcagaagttgcggacccaaaatttggtccaagtggtttagcgaggcttgggtttgcatagccgcttctcggtgcgggtgacagcgccgctctacatcacccgtcagcacgccgtgcagacactcgttgattcgcccgtctagttttttgctcagctgctgcagcgccgacagcaagtcctggttgaacttgtctagtagcggttgggcgcgttgatctaggcccaagagcagctcgagtgtggcctccagtggttggtgcgggatggtggagagcatctcgcccttaacggcgtccaccacgcgttgcaaatcctgctgcacctttttttggtagccgtccagtagctgccgttgctgttcttcctgtttacgtttctccttgtctaaaaagtcttgcatcttggtggttaacgtttgttgcatttgatgcatgacacgatggctcggtgcccgggccaagacacgctgcacgtcctccacagaagttaccgtgagcttgccggcctcttcttgccattcacgttctagccgttccaggtgctgttcttccatctcgtgttgatatcgctcgtagagttccgttacctgaggtccgacgcccagtcgtccgaccatatgttgaaagaaatattcatgattacggaaaaagtaaaccaactcccgtaacgcttggaaacgtttttcggatgcgccggtaccggctttctcgatctgctccagtttcttgaccatctgcgcgtacgtggcgttggcggcacgcagatcctcacgttcgtgcgagtcgggtggcagttgctgcaacaacaaactgacggcgtcaaaaaacgtcggtcgcggcgactcgtcgcgcgccagtcgcatcactaatgtgtggaacatgctcagtacggcgttgatgagtcgcagacgcgtctgttcgtcgcgacgtaacatctcgcgtaattgtgggtgtcgcttgatggtctgttcgttgggcggatcgtcgtacgagagtccgtcgaggaaacgctgcgtttcctcttcctcttcgtagaggcggcttagcgcgagttgcgcgttctgtaggcgctgctgcacttcgggtagctgcaggccgcctagcgcttccagctgagctagctgctcctgtaccaaggccagtgtcagcgccgagccgcggctgcccgggtcgcgcaccagcgtctcgatgacatgaagcaggtcgtggatctgcgtgaggcgaccctcgttttgctgcgtggcttgctggtacgcgtgtcgcagctgcaggatctcttgcagtagcggtacgttgtcgcgcacagtgcccgtcatgaggtagctcagttgttcgcgtatgacgacgaatccctcttcgtagctgccgtcacacagtttcaggtcgcgcaggtcgtaaaagagtctcagtacctgctcgacgacgcgttccatctgcttcaggtcctctaccggcaaaaagccgttaaggatgtgattgtgcacgcgcgtcagcagctgcgtgctcagacggtccaggtccatctgcaactctagcattttggcgttgcccaggcgaaagagttcctgcttggcgttgtcgtccaacggctgcagcgctttcagaatttcgcgtcggttcagatcgctggcgtctaggtcgtgaatgtcgatgctggtgatgaggccggccaagtgctcgtaaacgccgtggtattcctcgcgttgacgttgcaacacccgacgtcgctgttcgatgacctgcgtcagacgctgaaagtctacgggtcgcaggcagacgaagctgtcgctaacgggcatcggtcgcttggttacgaaacgttgcagtcgttgagacagttcgttagtgggcttgctttccacgtagcgcagcatctcctccacccaggcgatgagcgccgggccgtgctgacgtccgtagggatcgaagacgacttgcattttctccagcagtgcgcgatccagcgtcgagtacgtgcctttggtggtcttgtggctcaggtagtcgtgcatgcgctgcagatccaggccgtggtgcagccagttgagcagaaaggcatccagtttcttggataggcccagataggcgcgtaccgcctgctgcgccgccgattgcggaccgcaggggcgacgcagacacgagcgctgattgacggcatggatgatgagctgctggagacgatcggtgaggaaagcttcgtcgaaggacggcgccgtggccgttgccgcgttagcgccgctttcggtacccgccgcgtgcaacgtccaggcgctggtgttggcaggcaacggcggcagcgtcagagccttcaactcctgctctacctcgtcgaccagctgttggtagcggcccagggccggcagggccccttcgccgcagctgtaggacggtggtaccgcggacgaagaagaggccgccgctatcgctgagggggaggaggaggcggtggccagtgttttggacgtcgtggacgggggtttctttttgcctccgtgtttgctaccgctgaggtccttgcggcgtttctcgggtgtttttttgggtgaggacgagggatcgtagacgggaatgctgggcgccacgccaggagggcaacccgggtcgacgatggggtcgggcagcggaggtaaggaaggtgcggcggtggtcgttgtcgctgccgtgtccgcgctttctcggacgacgccggtgaggtcgatatcgcggtcgcgataggtggagaccaaacgcgcggcgatctcagcctctggtacggtcgccacatccagcatgtagagaaaaagggcctcatagtagaaagcgggcgacagctgcacgccgaagcccgtgagcaccatcagcacctgatggagaccctcgcagtgatacacggcggcgttgtgacattccgcggagctgtgcggatcaaagaccaacatgtggtcctcggtgaagaccacggcgcgcgccaacgagttgacggtgacgagtacgtaggtgggacgcggtttggcgtgcgcgtaccgcagaaagtcgaagatgcccggacacatgtagccgtccaggtcgcacgtctcggtggtgccgttgaagggccgcgagagcgcgtgcacggtccggccgaaccgcgactccaggcggcgcggcacttcgtcgcccagtctgtagaccggcagccgcccgccggcgggcagcttcttttgcaactcgcgctctagccgcgcgtccagacgcgcgccctcttccatgatggcgtccagcgcctcggtctgcaggacggcgctcgttccacccaggtgcaaggcgtgtaggaacatgatgccgttgcagacgcattgattgcccgctcgcgctccaaagcgagcgatgtcgccctggtggcagctggcctgtgtgactttcatggcgaggccggcggcagggacaccgatgtcgagccggcgggcgggtcgatcgaagacaagatgtcctgctgcgcctggcttacggggacgatgtaccagtttaataggtcgctcgcggccaggtgtgcgggttcgtagcgcgcacccaggacctccggtacggacgtcgcgcctgccgttgattcttcgtgatcggtgtcgggcgtcatgcggagtcgcggcggttggggcgccgattcccagggcgcctccaagaactcgcgtaaggcgcgatccgcttcggccgccgccgcaacgcccgtgcccgcgggccaggtcatcggcgctagcgcgcgatgtcggtgcagtaggctcgtcgcttccgtcagacagagctgtgcgccgcggcgttccaagttctcgcgacttagtacgtcaaagacggctagcgcgcgttgcaccgcggtaacgacggcgccattggaacgttgcgcctgctcgagcgccaatgtcacgcgtgtttccaacactttgattttggaggccgtctttttgagcgccttgctcatctgggccaccgtgcggtgacccttggcgtgtcggcttacttcctctgtgtcgctgctgatctgacgtacgcgcacgcgaacactcagcaggcgctcgttcaagccgcgcagattctcggccaacagccgatcgcggcgaaccagctcgcgcaactgttctacgaaacgcgtggtgggtacgcgtagtccgtattgaccttgtacctccacgtacaccgtcacgccgtcctccgagaggcgcgcccggccacgcgccagaccgaaacagagtcgcgtatgtcgcagatagtttctcagactgccggcgctgctgcgcatcacgtcctcgatcagcgggttgacggtggtgtacaggttatgcgctacggagcgcgccatgagctcggccagcaggtccacattgggcgtgacgggtacaccgctgaggtgctcgagagtcgtggcgatgtcgaagacgcaatcgcgtaccgtcttaaaaaccgcggcgtcgatgtgcttgacgaaggtggtcaggttgtagatggagaccaggttctggtacagcgtcacctgctcgggcaacaatacacggcacagctgaatgagtgcgaaaagacgcggcgaacccacggcttgaaacaggccctgcgggataccaaagatctccgagaactcagttaccaccaccaactgcgcgaagatgctggggaactcgggatgatggctgaaggctagcagggaggcgtagttgacgcggccttcgttcagattaacgagcgcgcattcgcgtaagatgtcggagcgtgtgacgccgtcaagcggaggcaaaggcgaggccgcgccggccgcgccgcgagacggacgcaaggtaaacaggtgcacgccccacttgctgtgcaggtcccgatacaggtactcgcgctccgcctccgtggcacccttcgtatgtgcctcaaagtcttcttccgtgtactgaaccgcaaagtgcgtattgacgttcagtgtcacgttgctccagacgtgctgtagttcctccttggagccgatcaacgtggatcgatgctgctccaaaatcaaccgccgccggtggtcgaacaggaacgtggggctgtacacatagaggcacatgaaaaacgtgtaaaaattgtagatgatctgtatgagtttctcgcgaatctcgctgacaaagagcgagctcttctgactggccggctggatcagcgccatttgtgcgtaggccgcgcaggtatcgtgattgaaacccagttccaccagtcgcattaccatctgcgtcagatctagtagccgttgcacgcgtcgcggcgtatgcaagtggtcttccagcacgcgatcgcacacgcgcgcgtaagcgtctaggttggcgcgcggcgaaacttcctcactcaacagacgcgagatcagacccgggtggaaaaacatacgttcgggcgacaggtaaaggttcacggtggagatgcgcgtgctaatgatgggaaacatgaggccgctggcgtcacgcgcttgcagattacccacgaacagcttgtagctgacgtcacgcatgtgttcggcaccgggcttctggtcgccgtcgatatcggaactgacgaaagagctcatgtgccgcacgctgttcttgacgtagttttgaaactccacggccaaatcgccgttaaccgaacggtagtgtgtgtaaaaaaaatgcatcagaagcaccgtgtccagttcggtgtcggtgtcgcgccgaaacaacacgtagggcatgagcgtgcaggcccagtagatgagccgctggtaggtcaggtccaggagttcggccacggcgcgacaattgacgtagggccgcgcctccgtggcagccgtttccagctgcgtgatcacccggcggaccagcggctgctggcccccggaactcgaaccgcccttcttgccgcggcgctcggtcgacgcgttgttactggcgatcaagtccgccgccgccgcggtgccgccgctctgttcggctattacggtctggatctcgcgcagggtctgcaacagcttctggaaagccgtcagcgtggccccgttgtggtagaacggcaaccggtcctcgtctccgccgccgtcgtgctggtgtcgcaggaagcggtccagctgttcgtgcaactgctcggcggcgtacagcgggtcgcgcgccgtctgtaccgtggcgtggcttaggaggtaaaagaccacgttctgacgcacgaagccaaagtggtagcccgagctcggcaacgcacccacgaaggcgcgcacggcgctcgcggtcacgtcctgggcatccaccgcgccgatctccaattggctcacggtatttaacgcctccgctttgtccgtggcccgtgcccgcagctgctctatcaactttttgaaatctaccgtgcgcctcgccatcatggacgcgcgcgcggtggccaaacggccgcgcgacccggccgacgaggacaatgaactagtgacggcgctcaaagccaaacgcgaggtaaatactatatcggttcgctatctctaccacgccgatcaccaggcgctcacggcgcgtttcttcgtgcccgagggcctggtagagttcgaggcgcagccgggcgcgctgctcatccgcatggagacgggttgcgactcgccgcgacacctctacattagcctttacctgttaggcattcgcgcctccaacgtctcggccagcacgcgctgcctgctcgaaagcgtgtacacggcctcggccgcgcgcgccgcgctgcagtggctggacctgggcccgcatctgctgcaccgccgcctcgagacgctgggctgcgtcaagaccgtctcgctgggcatcacctcgttgctcacctgcgtcatgcgcggctacctttacaacacgctcaaaacggaggtgttcgcgttgatgataccgaaagacatgtacctgacgtgggaagagacccggggacggctgcaatacgtgtatttaatcatcgtctatgactatgacgggcccgaaacacgtcccggcatctacgtgctcacctccagcatcgcacactggcagaccttggtcgacgttgcacgcggaaagttcgcccgcgagcgctgtagctttgtcaaccgtcgcatcacgcgcccgcgccagatccctctgtgtaccggggtcatacaaaagctgggctggtgcctggctgacgacattcacacctcgttcctggtacacaaagaactcaaactgtccgtcgtccgtttggacaactttagcgtcgaattgggagactttcgagaattcgtctgagcggcgctgacagcatacggggaggagacacagaagaaaaaaacacatcgcacacagactttataaaccgtagttgtcggcgccatctagactcactttattgaaatctacctgatttctttgttattttcctcgtaaacttatgaatccggctgacgcggacgaggaacagcgggtgtcctcggtgcccgcacatcggtgccggccaggtaggattccaagccgcagcgcggaaaccgagacggaggaatcgtcggcagaggtcgccgctgatactatcgggggagatgacagcgagctcgaggaggggccgctgcccgggggtgacaaggaagcgtccgctggaaataccaacgtatcgagcggtgtagcatgtgtagcgggttttacgagtggtggcggcgtcgtcagttggcgtcccgagtcgccgtctcccgacggcacgccgtctgtgctgtcgttgacgcgtgacagcggtcccgccgtgcccagtcgcggtggacgcgtgagtagcggtctgagcacctttaatccggccggcgcgaccaggatggagctggacagtgtcgaggaggaggacgatttcggggcttcgctctgcaaagtatcgccgccgatacaagctacgcgcatgttgatgggcaaaaagtgtcattgtcacggctactggggcaagtttcgcttttgcggcgtacaggagccggcgcgggagctgccgtccgacaggaacgcgctgtggcgcgagatggacaccgtgtcgcggcacagtgccggtttgggcagtttcaggctatttcagctcattatgcgccacggtccctgtctgattcgtcactcgccgcgttgcgacctgctgttgggtcgcttttatttcaaagccaactgggcgcgtgaaagccgcacgccactgtgttacgcttcggagctgtgcgatgagtcggtgcgccgttttgtgctgcgtcacatggaggatctacccaagctggccgaggagacggcgcgttttgtggaattggccggttgctggggcttgtacgcggccattttgtgtttggataaggtgtgtcgccaactgcacggacaggacgagagcccgggcggcgtgtttttgcgcatcgccgtggcgttgacggccgctatcgagaacagtaggcactcgcgcatctatcgtttccatctggatgcgcgtttcgagggcgaggtgttggaatcggtgttgaagcgctgtcgcgatgggcagctgtcgctgtccaccttcaccatgtctaccgtgggtttcgatcgcgtgccgcagtacgactttctgatctcggccgaccctttctcgcgtgacgccagttgggcggccatgtgcaagtggatgagtaccttgagttgcggcgtttctgtgtcggtgaacgtaacgcgacttaacgccgatgtgaacagcgtgattcgttgcctggggggatactgcgatttgatacgcgagaaggaggtgcatcgacccgtggtacgtgtgtttgtggacatgtgggacgtggccgctatccgcgtgattaactttattctcaaagaaagcacgtcggagttgacgggggtttgctacgctttcaacgtgcctagcgtgttaatgaagcgctaccgtgcgcgtgagcagcgctactcgctgtttgggcggcctgtctcccggcggctctcggacctgggtcaggagtcggctttcgagaaagagtattcgcgctgcgagcaatcgtgccccaaggtggtcgtgaacacggacgattttctgaaaaagatgttgctgtgcgcgctcaagggccgtgcctcggtggtctttgtccatcacgtagtcaagtactcgattatggccgacagcgtgtgcctgccgccgtgcttgagtcccgatatggcgtcgtgccactttggcgagtgtgacatgccggtgcagcggctgacggtgaacgtggctcgctgcgtgtttgcgcgtagcgacgagcagaagctgcatctacccgacgtggttttggggaacacgcgacgttactttgatttgagcgtgctgcgcgagttggtgaccgaggcggtggtttggggcaacgcgcgcttggacgcgctaatgtcggcgtccgaatggtgggtagagagcgcgctggaaaaactgcgtccgctgcacatcggcgtggctggcttgcacacggcgctcatgcggttagggttcacgtactttgcctcttgggacttgatcgagcgcatctttgagcacatgtactttgccgcggtgcgcgctagcgtcgatttgtgcaagtcgggtttgccgcgctgcgagtggttcgaacgcaccatctatcaagagggcaaattcattttcgaattgtatcggttgccgcggctctccatcgccagcgcgcgctgggaagcgctgcgcgccgacatgctcgagttcggattgcgcaactgtcagtttctggcggtgggtcccgacgacgaggtggcgcatctgtggggcgtgacgccgtcagtgtgggcttcgcgcggcaccgtgttcgaggaggagacggtgtggtcattgtgcccgcccaaccgtgagtgttacttccccaccgtggtgcggaggccgctgcgcgtgcccgtggtgaattacgcgtggttggagcagcaccaggaggagggcaaggcgacgcagtgtctgttccaggcggcaccggcgatccaaaacgacgtggaaatggcggccgtgaacctgagcgtgtttgtggaccagtgcgtggccctggttttctactatgactcggggatgacgcccgacgtgcttctggccaggatgctcaagtggtaccactggcgctttaaggtcggagtatataagtactgtgcctcttagtcgggggcccgctggctcggcgcggctgtattattagacgccgggcgtcttcgcagcgttcccggtcgtcgtgtgtgctctctataaaactttcgctcgctcgcgcccgctccttagtcgagacttgcacgctgtccgggatggatcgcaagacgcgcctctcggagccgccgacgctggcgctgcggctgaagccgtacaagacggctatccagcagctgcgatctgtgatccgtgcgctcaaggagaacaccacggttaccttcttgcccacgccgtcgcttatcttgcaaacggtacgcagtcactgcgtgtcaaaaatcacttttaacagctcatgcctctacatcactgacaagtcgtttcagcccaagaccattaacaattccacgccgctgctgggtaatttcatgtacctgacttccagcaaggacctgaccaagttctacgtgcaggacatctcggacctgtcggccaagatctccatgtgcgcgcccgatttcaatatggagttcagctcggcctgcgtgcacggccaagacattgtgcgcgaaagcgagaattcggccgtgcacgtggatctagatttcggcgtggtggccgacctgcttaagtggatcgggccgcatacccgcgtcaagcgtaacgttaaaaaagcgccctgccctacgggcaccgtgcagattctggtgcacgccggtccaccggccatcaagtttatcctgaccaacggcagcgagctggaattcacagccaataaccgcgtcagtttccacggcgtgaaaaacatgcgtatcaacgtgcagctgaagaacttctaccagacgctgctcaattgcgccgtcaccaaactgccgtgcacgttgcgtatagttacggagcacgacacgctgttgtacgtggccagccgcaacggtctgttcgccgtggagaattttctcaccgaggaacctttccagcgtggcgatcccttcgacaaaaattacgtcgggaacagcggcaagtcgcgtggcggcggcggtggtggcggcagcctctcttcgctggccaatgccggcggtctgcatgacgacggcccgggtctggataacgatctcatgaacgagcccatgggtctcggcggtctgggaggaggtggcggcggtggcggcaagaagcacgaccgcggtggcggcggtggttccggtacgcggaaaatgagcagcggtggcggcggcggtgatcacgaccacggtctttcctccaaggaaaaatacgagcagcacaagatcaccagctacctgacgtccaaaggtggatcgggcggcggcggaggaggaggaggcggcggtttggatcgcaactccggcaattacttcaacgacgcgaaagaggagagcgacagcgaggattctgtaacgttcgagttcgtccctaacaccaagaagcaaaagtgcggctagagcgcgggccgcgtgcctgggaacgcgcgcacggcgcggtcccgtgatggagaaaacgccggcggagacgacggcggtttcagctggcaacgtgccacgtgactcaattccgtgtataactaacgtgtccgcggacacccgcggccgtacccgccccagcagaccagccaccgtccctcagcgacgtcccgcgcggatcggacactttaggcggcgcagcgccagccttagctttcttgactggccggacggcagcgtcacagagggcgttcggacgacctccgcgtcggtcgccgcctccgcggcccgtttcgacgaaatccggcggcgccgtcagagcatcaacgacgagatgaaggaacgcacgctggaggacgcgctggctgtcgagctggttaacgagaccttccgctgctctgtcacctccgacgctcgcaaggacctgcagaagctggttcgtcgcgtcagcggcacggtgctgcgtctcagctggccaaacggttggttcttcacctactgcgacctgttacgcgttggttactttggacatctcaatattaaaggtttggagaagaccttcctgtgctgcgacaagttcctgctgccggtgggcactgtgagtcgttgcgaagccatcggccgcccaccgctacccgtactcatcggcgaaggcggtcgcgtctacgtctactcgcccgtggtggaatcgctgtacctggtgtcgcggtccggtttccgcggcttcgtgcaggagggcctgcgcaactacgcgccgctgcgcgaagaactgggctatgtccgcttcgagaccggcggcgacgtgggtcgcgagttcatgttggcgcgcgacctgctggccttgtggcgcctgtgcatgaagcgcgagggttccatcttcagctggcgagacggtaatgaggcgctgacgacggtcgtcttgaacgggagccagacttacgaggatccggcccacggcaactggttaaaagagacgtgctcgctgaacgtgctgcaggtatttgtggtgcgggccgtgccggtggagtcgcagcagcgcctggacatctccatactggtgaacgagagcggcgccgtcttcggcgtgcatcccgagacgcggcaggcgcactttctggcgcgcggactcctgggcttctttcgcgtcgggttcttgcggttctgcaacaactactgcttcgcccgcgactgttttacccaccctgaaagcgtggcacccgcttaccgcgccaccggttgtcccagagaactgttttgccgtcgtttgcgcaaaaagaaggggctctttgctcgaaggtgaaccgcggacgccgtcggtaccgtctccaccacagttaccaccgtcgccgtcactgccaccgacatggagcccacgccgatgctccgcgaccgggatcacgacgacgcgccccccacctacgagcaggccatgggtctgtgcccgacgacggtttccacgccaccgccgccaccacccgactgcagcccaccgccctatcgacccccgtactgcctggttagttcgccgtcgccgcgacacacgttcgacatggacatgatggaaatgcccgccaccatgcatcccaccacgggggcgtactttgacaacggctggaaatggacttttgctctcttagtggtcgctatattagggatcattttcttggccgtggtgttcaccgtggtgattaaccgggacagtgccaatataacaacggggacgcaagcatcatcggggtaacggggatagagcatgtgcttgactgtaccatcattgctgctacggaataataactacgctacgacctggcctgtggtgtgtgttgttttttgtgcacgcacgacatgacactcttttgccgcaccgccaacagcaccgccggctacgtcgacatgaacgtctgcatcggcatgatcggcgtggtttgtttcgttttcggggtctttattctcatcttttgctccacgttgaaagctttctacgtgcggcaaaagacttaccacctcctgggtaccgagtcggacgacgaggagaccacggtttgggaaaagcgccggatggagtcggatacagacttttaaaagaagccataaaaatatgggaattcccctgcctacgtcttcatgacgggcgcctttttcttcgcctcgggctctgtcttgtcgtcattcgggccaggactttttaatggccaacagcctgtggcaccgcctccgaacgctcgtgagcaacagtcggcagaatgaacaaattcagcaacactcgtatcggcttcacttgcgcggttatggctccgcggactttaattctgacggttggactcctgtgtatgaggatcaggagtttattgtgttctcctgccgagacgacggtaacaaccgccgccgtgacgtccgctcacggtccgttatgtccgctcgtgttccagggttgggcgtacgccgtgtaccaccaaggcgacatggccctcatgacgctcgacgtgtactgttgccgccagacctccaacaacaccgtcgtcgcgttctcgcatcatcctgccgataacacgttgttgatcgaagtgggtaacaacacgcgccgccacgtagacggaatttcctgtcaggaccactttcgcgcgcaacaccaggattgcccggcccagacggtgcacgtgcgcggcgtaaacgaaagcgcttttgggctcacccacctgcagtcctgttgcctgaacgagcattcacaactctcggagcgggtggcctaccatctgaagctgcgacccgccacgttcggtctggagacctgggccatgtacactgtgggcattctggccctgggctcgttctcctccttctattcccagatcgctaggagcctgggggttctgcccaacgatcatcactacgccttgaaaaaggcttgataatgataattgcacatcctcacgagtgcccttacctatcatcacactaagaataaagaaaatcgatcggtgtcgtgacgtgtggtgtgtgtttttcacggttatcgggtaccagggaggaggggttaagaggtcacaggtgcgatttaccgtaaagagagtcacacttaagaaaaaggtggaaatccctcacccgtcttattcccgtcagtgacgtgaatcgcccctcacgtcagtgttgtcccctatccgcgtgagttgggtggctcaccgtcaggtgctccgagacgcgcgtactcggaaactgtgcgtcaatgcggtcggtcagccgaccctttgatgtagtacatcgcgtgcgaagatgaaaaacatcttaagaaaccgggtcgcctaaggggaaaaccccacgtgtcttgggcgcgtcatgtccggcatcttcatgtatataagacggtgtttcaagacgacgtgagacccacacgcgggtttcacttctttctttaattatgtctccagtctacgtgaatctgttaggtagcgtgggcctgctggccttttggtactttagctaccgctggatccagcgaaaacgccttgaagatcctctcccgccttggttaagaaagaaaaaagcatgtgcgctcacccggcgttctcggcaccggttacgccgccaacatggcgtaattgacggtgagaactcggagaccgagcggtccgtggacttggtggccgcgctcttggccgaggccggggaggagagcgtaacggaggacacagagcgggaggacacggaggaggaaagggaggatgaagaagaagaaaacgaggctcggacgcccgaggtgaaccccatcgacgccgagggcctctcaggacttgcgcgagaagcctgcgaagccctcaaaaaggccctgcggagacaccggttcctgtggcaacggcggcaacgagctcggatgctgcagcacaacggcccccagcagtctcaccagtaagcaggggtaaacaaaaaaaccacagactccgggatagtataagaagggactttaccgctattgctgctattcatagagaaggatagaaaggatgactacgaccacgcatagcactgccgctatcatgagcctgctggacgaggccgagtggcgacagacgcagatggacgtggggggactgatccaggcgtcggcgttgggcaaggtggcgcttcgctacgcggtgaggaaactgatgaagcgcggagccaggctgcggcacgactcgggtctctacgtgtgcatctgcgacccttcgtacgagtttctgcagatgaacctgagcaagatcagttggctggagcgacactgccccccgttggaccaggagctcatcatgttcggggtcatcgaggcctgggaggaagcttcggtgcggcccacgcgtcagctggtgttgttcatgacgcccaagtgggacgtgttcgcctacgactccggtatcctgtttttcctggcgcccagcatggcgcagttctggcacggtgctatcgtgctggagtattggaacgctttgttcccggtggaggtgcgctcccacgtccgtcagcacgcgcacactatggacgacctggtgatggtcttccaccagctggactacgaaaagcaggtgctggaagcgcgtcgcgacaagaatacggaggggccgcgcacttttgccaagtcggtgaacagctacgtgcgcgccatcctggaatctgagcggcggatccgcgaagggaaaattcctatgaccttcgtggatcgcgactcgctgcgagccaattcgttggcccacatccaggccaccggggctcagccttctcacgccccggcgcaacgggtgctgtccgcgccgccgagcctgccgttgcccgtgtcggaagaagatcccgctgccgccgccaccccttcgtcctccgccgccaccacccccccgtcctctgtcgtcccggcctccgtcgagagcgagttgtcctcgtcgccgccgctgccgccggtcgtggtgaaggatgtcgtgtacacggccggggagggcgacgtggtacagatggtggtcgtggtctagaaggagaactttgctgctagatgaccatgttcagcttttttttttgtagtattttttcatagttgctatacctcagttatcccccctattagccccacatgctgcttaataaacatacttgtttcattttctttctagtgccgcggttttttgtcgcgtccacgggctgcgcgggtttcaggtaaaaacaacgtgtgtgataaacgtgggtttttacctacgggaaaggggagggtagaaacgtgagtctccgtcaataaaaagtcccgtgtcgtctccacgtaggtttctgtgtggctgttgttgacgctgctttggagcacgggacacggtgtttcggtccgatgtacgtaccacggtacggacgttaatcgcacttccaacaccacgagcatgaactgccacctaaactgcacacgcaatcacacgcaaatctacaacggcccctgtctcgggaccgaagccagactgcccttgaatgtaacgtttaatcaatcacgacggaaatggcacagcgtcatgcttaaatttggttttcagtatcacctggaaggctggtttcccctgcgtgtcttgaacgagagtcgtgagataaacgtcacggaagttcacggagaagtagcatgttttaggaatgacacgaacgtgaccgtgggacaactgacgctcaacttcaccggccacagctacgtgttgcgggcaatagcgcacacgagtccgttcgaatcatacgtacgttgggaagaaacaaacgtcactgacaacgctacttcttcagaaaacactaccaccgtgatgtcaacactgacgaaatacgcggaaagtgattatatctttctacaagacatgtgcccgcgatttctcaagaggaccgttaagctcacgagaaacaaaacaaaacataacgtgacagttacgggaaataacatgacaacgcttcccgtctggacaccggaatgcaaaggatggacgtactggaccacgttgtccgtcatgtggagaaaccgccgttcggctctcctccgagccaaaagtcgcgccttgggacactgggcgttgttgagcatatgtactgtggcggcgggcagcatcgcgttgctcagcctcttttgcatcctcctcatcggacttcgtcgcgatttgcttgaagatttccgctacatttgtcgggacgagggaagttccagcacaaaaaacgacgttcatcggatcgtctgacgtcaacgctgatagtgtctataaaggccgtgccgccgcgccgtagttctccgaaggcggacggaggagtctgtcgaccgcagcggtggctggagaagcgcagcgtcggcgagcgaaggtagaggagtccgtcatggacgacctacgggacacgctgatggcctacggctgcatcgccatccgagccggggactttaacggtctcaacgactttctggagcaggaatgcggcacccggctgcacgtggcctggcccgaacgctgcttcatccagctccgttcgcgcagcgccctggggcccttcgtgggcaagatgggcaccgtctgttcgcaaggtaagccccacgtcgttgaagacacctggaaagaggacgttcgctcgggcacgttctttccaggtgttttcaacgtgcgtggattttttctattctctaccaggtgcttacgtctgctgtcaggagtacctgcacccctttggcttcgtcgagggtccgggctttatgcgctaccaactcatcgtgctcatcgggcagcgcggcggcatctactgctacgatgacctgcgcgactgcgtctacgagctggcacccaccatgaaggactttctgcggaacggctttcgtcaccgcgaccacttccacactatgcgcgactaccagcggcccatggtgcagtacgacgactactggaacgccgtcatgctctaccgcggtgacgtggagagcctgtcggccgaggtgaccaagcgaggctacgcttcctacaccatcgacgaccctttcgatgagtgtcccgacacccatttcgccttctggacccacaacacagaggttatgaagttcaaggaaacatccttcagcgtcgtccgcgcgggcggcagcatccagaccatggagctcatgatccgtaccgtgccgcgcatcacctgttaccaccagttgttgggcgcgctgggccacgaggtgccagaacgcaaagagttcctcgtacgccagtacgtcttggtggacactttcggcgtcgtctacggctacgaccccgccatggacgccgtctaccgtttggccgaggacgtggttatgttcacctgcgtcatgggaaagaagggacaccgaaaccaccgtttcagcggccggcgtgaggccatcgtgcgtctggaaaagacacccacctgtcaacatcccaaaaaaacccctgaccccatgatcatgtttgacgaggatgacgacgacgagctgtcgctgcctcgaaacgtgatgacgcacgaggaggctgagagtcgcctgtacgacgccatcaccgagaacctgatgcactgcgtcaaactggtgacgacggactcgcccctggccacgcacctgtggccgcaggagcttcaggccctgtgtgacagcccagcactgtcgctgtgcaccgatgacgtggagggtgttcgccagaagctgcgagctcggacgggctcgttgcaccactttgaactctcctaccgctttcacgacgaggaccccgagacctacatgggcttcctctgggatatcccgtcctgcgaccgctgcgtgcgccgacggcgtttcaaggtgtgcgacgtcggtcgacggcacattattcccggcgccgccaacggcatgccgcccctcaccccgccacacgtttacatgaacaactgatcaaggaggggatgatgagcacgatggtcccgtttgtttatgtgcatgtttttgtatataatacagcattttatataacctttccctgtcttttctactcgtaaactgtgtacttcgctagtcaataaagaaaaccacactgttaaaaaaaccacgtcgacggtatttttattgatatcgacgtctcatcttgagacagacacgtagaaaaagaggaaaaaccgctttcagagatgccgtaggttttcggccagatcgtcccgcgggtcttcgacgtcgctgccgtagctagtgctcggcatgctgtcgggtccctggaagcgtgtgtgggccggccctcggggtgcgggtggcgggctgcgtcgccttcggtgacgtcggtggtggctgtaggctaccgagtagggcgaaaagagggtcacgctgaccatgcggcgtcgttgccggggcggctgctccaggtccgcggagctaatgccgtgcgaccccgacaaggaagaagagagcaagagacctgtggtagaagaagtcccggccgaggtgtacgtggacgcgggcgtggtggttcgtgtggatgacgacctggcagacggcagcgaaacagaattcggagatgctgaggacgacgacgaagacgcggacgacgaagaagccgcgtcggtcacaggacggcgaaaaacatcggcaaataaatcgcgatgttctgtgatctcgggttccgactcctggcccagaggcgctctgtcgaggagttccatgaagcgcttgggtgtcaggcccgtctgccgagaggcgccctcgatcatcatgctatagatgcgctggaggtgatacgtctcggtggtgatcttgccttcgtggaagttataaaagatctgcagggtttcgggccgttccacgaacatacgtcggcgcaggtagcggctgggctgttctggcacgcggaaaacctcaccgttgccgtacaggttcttggagaagaaaaagagctcgccctcgcgcgccgtgggatcggcttcgagatcgagctgggcctcgcgcggctcgccgtcgttctcctgctcttcgtcctcgtccccgaactcgccgcgctcgcgggcgtccgagaccgattggatctttttcagcagcttgtacgcgctgaaatgtaaatatcccgggcagaggtacacgttggcctcgtgcagttgcgtcagtagctgcaacagattgtacagcatcggctggaaggccggactgctgtgttgccgcgcaagttccagcccacgcaccagcgtgacgaaagtctgccgcgtctcgggggcttgcgtgtaacaaaagtaaagcgcgtcgcaaagccggttgcagcgttccaccacccagtcctgcatcatttgtagctccagcgcgtgtcgcagctgcaagtgtcgcagcgtcaacaacagatacatgtcgtttagcgcgtcctccagggtgcgtgagcccgggcgtttgatggaggtgaggcagcgcaacggtcggttacgacgttgtgttacgtcggacaggttctcggcgcacagatccaccgcctcgaccgtggtgaagggcggtgggtggaacagcaggttgtaggtggtgaggcgcggatagcgcgcctcggcctcgggagacgcgcgcagccccagcgcgtcgcgtacccggtgcagccggaccagcgctcgttttagcacgccgaatgtcacatcgtcggcgcctaggtgcacgctgatgtcctcgggcttgacgccggtttgcgcagcgcggcagagccggatgagccctctaagcagccgcgtcttaagcggatccgagtacagcacgtcgagctgcgtgcgcaggtcccgcaacacgtcgcggctgttgcggtagtggttagcgagtatgcagatacggataatctcctgggccacgggctttaccttcataaaagcgttgcgcacctggaagtccaccagggcctccagcgcgtatacggggctgggcacgccaaagttgagcagccccacaaagttggagcagccctgggtcaacatttcgagcagcaggcgccggtgctcgtccccaaatagatcaacccgaaagttgagccagtcgtccacggggagaacgggcagtggcgggcccgatggggctcgcgatccttgggccatgatggggctccctttgaaaacgaaaccaaaaccagagcggaacttgagaaatcaacgctttattgttctccagtgacgttaaatacacaacggggttatgggggacgtgacgggggtaagggctggggtgactgaaggtgagggggtcgcggcgacccgcacagcggtctggctggctagaggtccgtcttcttcgtcggcgcgatgccgcagggcggtcgctagcgtgtcgcagcgttcgccgccgttgccgtcgtcgttggagacggagggttctgcccgcaggaatgctgcggttgccttgcaggagggaaacagctcctcttcttcctcctcgttttcttcgggcttttgctcgtgaggcggcacgcgtgtgcggggacgacgggcgttgcggggcttcttggactcgtgaagcggcgccgggtcgctgtgacggagctcgtcgtcgtcctcctctccctcgtcgttgttttcatcggcctcgggcggcccggccgccgcgccgtgtgagagttccagggccgccgacaccgagtccgtatgaccgatctggaagagcatgcggtaggcctcgctgtggtaacagccgtcgaaaacttgtgcgatatccaaacctgagttcatcaacaggtgtaggaagctgttctgcaggtagtggcgcaggtgtccgatgagacggatggagcgcgcccacatgtgcggcgtctggtgcaacaagccgatgaggacgtggcacagttcgcggtggcgctcgtgtggcagcagggctaccagttgatgcacttccacgcccagcgccgatttttcgccgcagcgtttagtcagctcgtcgcgcgcgtagctcaccaccttgtcctggtgctcgcagtagtggcgcagctgggccgtgaaaaccagctggttgaagagcgcgcacacgcgcgacacagccgtctgcagctcgtcggccggcgtgggcggctcgcggagactgggctgcaggcggcagcggatactggccgtgacttgctggatctcgtgggggtccagttcggccggcgcgcgcttgagctgtgcgatgccctggtggaacttgcggtagtcgcgctcggtgcagaaaacgaagaggttgctgttgcggcgcgagcagccgccgggcggcacgggcaagtgcttcagcagcagcttcttcttgccttcggcgcgtaccgtgcccttgtacgctttggaaatcgagcctgccacgttgtcacgcatctcggcggctcgcaggactgaatcgtcgttggagaagtctcgggtggtgatgatgaagttcatgacgacgacggcggtggggcggtaatagtataggtccgtgcgagcaggccgccgccgtgggggccgcggagggaggagagggacgggaacgatcaccgctcggagaaaacaacgtcgacgggggacgttgtttttatcgtaccgtgccgagacagaagttgcgccggacggcgttgtggcgcgcaggggctccgacgtggcgttataatgaagccggggcgccactcctacgccacgcgattggccgtcggcgtccgcagtcgggcgaaatctgtgtaccgtgatgacagatcagggggacgtgtaccgtatatgaggggaaatggcgacgggttctggtgctttctgaataaagtaacaggaaagctcataccccgctgaggttatgatgcgattgtgagagtcgatgggggatttttgtggatgtgtcgttggacgcggttttctggccgcctttccacgtaccgctgggaaaattgaaagacacgctgcgtttggcgtgctgattgtagtttttgctattggtgtctaatgacgtagccactgattgtgaattgttgccagccgctagatttgtctccgctgtagctcgctgattctgctgcgatctcaggaaagcgcggcggtccagcaactgaccgcggaaacactgccgcatgcgttgcagaaaatcatgacccagcagcgcgtacaggatgggattaatgaggcagtgtaggtggggcaccacacgcgccagcgtgccaatggtgcgtcgcagtgtgaggtgttcacactgcatgggccaggcggttgtggcataactgttgaagatcatgagagagacgtagggagtttgtagcgccacgaaggagatgagtagcacgctaacaaaggttaaggtacgactcctttgtttctgtgacgtgcgctgtacggttgagtagaagaatgcgtagaaccacgtcatcattatcacgggtgcggcaccccataccatcgtcagcagcactttccacgaaagcagcactgtgtgcacttcttcagctacgaagtacagtacacaggtggcgtgcccattagtattattggtatcgttggcatcgtgatgcatcaccaccgtggtgtaaacagctgcgggcacggaaaaaattagtccagcgagccatgtcaatagcaaaatcatataggttgaacggtatgattggcgtgcgtatgttcgtttatgaaggacgcgataacgatcggcggcgatcagagctacggtggcaaagcccactgtgcagcttgagtagtagatcaccgatagaaatttacacgaggccacgccggccggcaacagccactggttgctgagtacgataaagggtagcacagtaagcgtgagaaaattagtagagtagaggttggtcatgtaaatggtgggcgtcgaatagccaagcacgcgattcgtgagcagctgcgtgatcaacactatggcgttaagtggaccgcccacgaagatgatgaatgtgttgagtacggcttcggtggttcgaatggcgaatagcggccctgtcatgttgcaagtgtcattgatgtgcggaggagtgttgttgcgggtctgggcggaacagcacacggggcgaaaaaacagaagaaacaagtcagcggcgcttaaaagaaaaccgcgtatccgcctccgctattaaactaccccccctccctctaggtggggcgctcaccgagttgtggatgatggtgtccatcgtgggcgaatagcagaccgcgggcgcagtccggggcgacgacgcttccgggttctggagaaaagccagcatgagtttgcagtttatcggtctacagcggcgcgatgtggtagccctggtcaactttctgcgccatctcacgcaaaagcccgacgtggatctcgaggcacaccccaagatcctgaaaaaatgtggcgaaaaacgcctgcaccggcgtacggtgctgttcaacgagctcatgctttggttgggatactaccgcgagctgcgttttcacaaccccgacctctcctcagtgctcgaggagttcgaggtgcgttgcgtggccgtggcgcgtcgcggctacacttacccgttcggtgatcgtggtaaggcgcgtgaccacctggctgtgctagaccgtaccgaattcgatacggacgtgcgccacgatgccgagatcgtggaacgcgcgctcgtaagcgcggtcattctggccaagatgtcggtgcgcgagacgctggtcacagccatcggccagacggaacccatcgcctttgtgcacctcaaggatacggaggtgcagcgcattgaagaaaacctggagggtgtgcgccgtaacatgttctgcgtgaaaccgctcgaccttaacctggaccggcacgccaacacggcgctggtcaacgccgtcaacaagctcgtgtacacgggccgtctcatcatgaacgtgcgcaggtcttgggaggagctggagcgcaaatgtctggcgcgcattcaggagcgctgcaagctgctggtcaaggagctgcgcatgtgcctttcctttgattccaactactgtcgcaatatcctcaagcacgccgtggaaaacggcgactcggccgacacgctgttggagctgctcatcgaggactttgatatctacgtggacagcttcccacagtcggcgcacacgtttttgggcgcgcgctcgccgtcgttggggtttgacgatgacgccaatctcctctcgctcggcggcggttcggccttctcgtcggtacccaagaaacatgtccccacgcagccgctggacggctggagctggatcgccagtccctggaagggacacaaaccgttccgcttcgaggcccatggttctctggcaccggccgccgaagcccacgctgcccgttcggcggccgtcggctattacgacgaagaggaaaagcgtcgcgagcggcagaaacgggtggacgacgaggtggtgcagcgtgagaaacagcagctgaaggcttgggaggagaggcagcagaacctgcagcaacgtcagcagcaaccaccgcccccggcacgtaaaccgagcgcctcccggaggctctttggctccagtgccgatgaggacgacgacgatgatgatgacgagaaaaacatctttacgcccatcaagaaaccgggaactagcggcaagggcgccgctagtggtggcggtgtttccagcattttcagcggcctgttatcctcgggcagtcagaaaccgaccagcggtcccttgaacatcccgcaacaacaacagcgtcacgcggctttcagtctcgtctccccgcaggtgaccaaggccagcccgggaagggtccgtcgggacagcgcgtgggacgtgaggccgctcacggagaccagaggggatcttttctcgggcgacgaggattccgacagctcggatggctatccccccaaccgtcaagatccgcgtttcaccgacacgctggtggacatcacggataccgagacgagcgccaaaccgcccgtcaccaccgcgtacaagttcgagcaaccgacgttgacgttcggcgccggagttaacgttcctgctggcgccggcgctgccatcctcacgccgacgcctgtcaatccttccacggcccccgctccggccccgacacctaccttcgcgggtacccaaaccccggtcaacggtaactcgccctgggctccgacggcgccgttgcccggggatatgaaccccgccaactggccgcgcgaacgcgcgtgggccctcaagaatcctcacctggcttacaatcccttcaggatgcctacgacttccacggcttctcaaaacaccgtgtccaccacccctcggaggccgtcgactccacgcgccgcggtgacacaaacagcgtctcgggacgccgctgatgaggtttgggctttaagggaccaaactgcagagtcaccggtcgaagacagcgaggaggaagacgacgactcctcggacaccggctccgtcgtcagcctgggacacacaacaccgtcgtccgattacaacaacgacgtcatttcgcctcccagtcagacgcccgagcagtcgacgccgtccagaatacgtaaagctaagttatcgtctccaatgacgacgacatccacgagccagaaaccggtgctgggcaagcgagtcgcgacgccgcacgcgtccgcccgagcgcagacggtgacgtcgacgccggttcagggaaggctagagaaacaggtgtcgggcacgccgtcgacggtacccgccacgctgttgcaacctcaaccggcttcgtctaaaacgacgtcatcaaggaacgtgacttctggcgcgggaacctcttccgcttcttcggctcgacagccgtcagcctcggcgtccgttttgtcgcccacggaggatgatgtcgtgtcccccgccacatcgccgctgtccatgctttcgtcagcctctccgtccccggccaagagtgcccccccgtctccggtgaaaggccggggcagccgcgtcggtgttccttccttgaaacctactttgggcggcaaggcggtggtaggtcgaccgccctcggtccccgtgagcggtagcgcgccgggtcgcctgtccggcagcagccgggccgcctcgaccacgccgacgtatcccgcggtaaccaccgtttacccaccgtcgtctacggccaaaagcagcgtatcgaatgcgccgcctgtggcctccccctccatcctgaaaccgggggcgagcgcggctttgcaatcacgccgctcgacggggaccgccgccgtaggttcccccgtcaagagcacgacgggcatgaaaacggtggctttcgacctatcgtcgccccagaagagcggtacggggccgcaaccgggttctgccggcatggggggcgccaaaacgccgtcggacgccgtgcagaacatcctccaaaagatcgagaagattaagaacacggaggaatagttaagaaacacacacgcagacgtactttttaatgaaaccatcggatagtgacgtgtcgggaaaggaggacggacggagggtcagggatggggagacgtgagaaagttgtccgcgggcaattgcatgtcgcccagaaagaacgtggttgttccggcggcgtgcatctgccgaaacaccgtgtggtggttgtacgagtacacgttaccgtcgccctcggtaatttgatacaacgtggcgatgggggtgccctgcgggatcacgatggaacgcgtgcgcgtccacagcgtgactttgagcggctcgccgccgcgccacacgctgagccccgtgtaaaaggcgtcctcgtgtggcaagttggccaccaagaaacaccggtctgtgatctgcacgtagcgcaagtccaactccaccgtctgccgcggttgcaccccgaagtggatatcgtaaggcgcgtgcaccgtgagcgaaaacacgttgggctcattgagaagcggacagttgagcgcgtcgccgctaaaaaagagtgacgggttgcggctgaatcgcaggtcgtacccgcgctgcgcgctcgtcagcaggtagaaggaaaaagcgcgcggcatgttgcgcgccgtgatcttgtccgagacgcggtgacagaaggaggtggccacggtgcccagcagttggcgctgttccgcgtccacgcatagtgaatccacgttgacggtgaaaatgagacccatgaattcgtactgcacgtttttggacgcgatccacgcttcgtcctcgccgggtagcgctgcctcgtcgtcgtccatcgtgccgcggaactgcgcgaggtagcgcgtaatttttttgtgtccgtacgtggttacgcgcttactgatccaggtcagatggtccacgcgacatagcagcgtcgcgccatgccgcgtgacgctgacccgtccaaagggcgccgcctcctccaaccccgcaacgccgctcggagcaccgccgcagcccggctttcccggcgtcgtgaaaggcacggcgtaatgcgggcaggcgtgcggcacgaagggcaccatgaccagttgtgtgtgcagaaaaccgatctgcaccgcctgcgactgccgcatggtttcctcgtcgtaaaccgccatggacgagcagagcccgcccttggtgatgagcggttgcagcaccacggagctctcgctggtggagcagagcagaaagaagagctcggcgtacgccgccttgggcgtcaccacgttggaccagtcgtacttgtagccgcagccctgcgtgttgttgtaaatgacgggaaacgagagaaagatgcagccctgcacgtacgaagctttctccgtcacgttcgaggccgtgttgtactgctcggtgatggacaccaagtacgactcgtaggccgtcaggtgcgaggccgaacggtgaatcttggcgtggcgcacgcagcgaccgtagttgtcgcggtccgcgtcgcgtagcgcttcgatccacgaggtcaccacgtcctgcgccggcagacgatagtcctgctcggggtccatgtggcggcacagccgcaggcgctctgccagttggcgagggataccgtcgtgcgaccttttgaccgcggtggtgcctgtcgtcctcgtctcccctccttcgttctccctgttttctcttctctcattcccggtctccggatccgcagccgctacctcttgctccgcggttttctcgcccacctcgctcgtcgctgtcgccgccaccgcagcggcggcgacggacggcggcggtaacaacagctccgtgaagctgacgagcggcagcggcgacgacggtggcggcgacgacacggcgacggtcaacagggtcacaagcgtgggtttgtcccccataatctggtcgccgccaccgccgtcgttgccggtccccgtttcctccggcgtcgcggtttccgccgtctccggatgagcggccgcggcgcgggctcggcgtcccgccgtccgagacggtgtatataaaccgcgtcggcctcgccggcccgagcgcgccggggagaagaacctcttcccgggccccgcgttcaagacggcgtgccgtgacgctcgatgggtccgcttcatcagactgcgtacgctttggagcgtcagacccagggcgcatgtagccgacttggaggactttgccgccttttatcgcaccctctcggacagtgagcagcaggagttcgagcaagaagccgaactcgcctcccgctcacaacgcgtgcaacacctgcgcgaggcccggcgccagctcaagatggacctgatgtgtcacggcggttgaaaacgcgcatgatctcgcgaagccatctacgcgcctgtcagggcgatgacgacatcagcgatgacggctcctgatacgcgccggcagctgcagcacgtggagacgctgcgtcggtttctgcgcggcgacagctgctttgtgcacgatctccggggcatgatggactatcacgacgggctctcgcgccgtcaacagcgtgccttttgccgcgcgagtcgcgtgttgacggacccggagcccatccagagcgaagcggagggggagaataaacagtttacggagcacacacacaaagtagtctcgttttttattaaaagtgtctttgtatttccctatcttgtgttgcccaactgctgtcaggtctccgtagatcgctcccgggtgcccgagacggggggcagatggctataaaaacccaagtagcggcgcgccccggcgttcagtcgcggctgagcgtgtggaggacggggtggagcgggtcgccgaggctactgctgcttctgcttttttgtctcctgtggatcgtcgcggactgccggcatgtccggccgtcgcaagggctgctcggcggccacggcgtcttcctcctcgtcgtcgccgccgtcgcgccttcctcctctgcctgggcacgcgcgtcggccgcgtcgcaaacgctgcttggtacccgaggtcttttgcacgcgcgacttggccgacctgtgcgtgcgacgcgactatgagggcctgcggcgttacttgcggcgcttcgagggctcgtgcgtgtcgctgggctggccctcgcagtgcatctacgtggtcgggggcgagcattcgccgcactcgctgaccgagatcgatctggagcactgccagaacgactttttcggcgaattccgagctctgcatctcattggcacggtctcgcacgccacctgccggtaccaggtgttcgtggacgcgtacggcgccgtgttcgcctacgacgcgcaagaggactgcctgtacgagttggcctcggatctggccggattttttgccaagggcatgatccgctgcgacccggtgcacgaatccatctgcgcgcgtctgcaacctaacgtgcccttggtgcatcccgaccatcgggccgagctgtgccgccgctcgcgcgcctccgctcgcggccgctacctacgttcgctgctggctttccgcgagttgctggcctgcgaggacaccgccgctcgttgcgcctacgtagaggcgcaccgcgaggcgcaactgaccctcatctggcccgagaagcattccctagtgctgcgcacggcgcgcgatctggggctctcggcctcgatgctgcgccgctttcaacgttcgttgtacacgcgcgagcccgtcatgccgctgggcgaaattgagggcgccgaggacaagaccttctttcaccgcgtgcggattctctgcggcgacacgggcaccgtgtacgcggcgctggtggggcaggataagttggtgcggctggcgcgcgacctcaggggcttcgtgcgcgtggggctggcgctgctcatcgacgactttcgctacgagagcatcggccccgtggaccgcagctcgctgtacgaggccaatcccgagctgagactgccgttcaaaaagcgtaggtgagtcatcagtgtacacgcgcccagaaatagggcgacggtgtttttataaccgaaagtagcgtgtttgagacacgcgcttctggtcggttttttcaccgtcgtcgctctaggtttgattttcgcgctcttgtgtctcccgacaggctcgtcgtgggctactttgactcgctctcgtcgctctatctgcgcgggcagcccaagttcagcagcatctggcgcggtctgcgtgatgcctggacccacaagcgcccgaagccgcgcgagcgtgcgagcggggttcacctgcagcgctacgtgcgcgccacggcgggtcgttggctcccgctgtgctggccgccgctgcacggcatcatgctgggcgacactcagtactttggggtggtgcgcgatcacaagacctaccggcgcttctcgtgcctgcgccaggctggccgcttgtactttatcggcctcgtcagtgtgtacgaatgcgtgccggacgcaaacacggcgcccgagatctgggtctccgggcacgggcacgcctttgcgtacctgcccggcgaggacaaggtgtacgtgctggggctctcgttcggcgagttttttgagaacggcctctttgccgtgtacagcttctttgagcgcgactacgtggatgagatcgtagagggcgcgtggtttaagcacacctttgcgggcatgtacgaactctcccagatactgcacgaccgcgccaatctgctgcgcgtatgtcagctccacgccggtagcaagatccgcctgggcggctcgcccgcttgtactttcactttcggctcgtggaacgtggccgaggccgacgaggccaacaatttcgtgatcggcgtgctagaacaggcccattttgtagtcatcggatggatggaacccgtgaacaaagccgtatttatggacgcgcatggcggcattcacgtactgctgtacggtacgatgctggttaagttggccgagacgctgcgcggttttatccgtcagggctccttctggtttcgttgcccacggcgtttttgcttctcgccgttggactcgagcgcaaccgtcgccgcgaaaccggtgagcagccatacatcgcccgcgtacgacgtcagcgagtacgtgttttcgggccgtagcgtgctggatagcgtgagcggcacgggggcgtcgtgaaggaggagactgtgatgactagctatatagccggtgtctggctttaccgccgtcgctccgcgtcgcttcgccgccaccttcttcttcctctcagtcatgaaccccgtggatcagccgccgcctccactgccaacccagcagccggaggagcaggctaaagaagaccatgacgacggtgacgagcgcctatttcgcgatccgctcaccacgtacgagtatctcgacgactgtcgtgatgatgaggagttttgtcaccagttcctgcgcgcctacctgacgccgattcgtaatcgacaggaggctgtgcgcgccggcctgttgtgtcgcacgcccgaggatctggcggccgccggcggtcagaaaaagaaaacgccggcgcccaaacatcccaagcacgccatggtgtacattcgccgcagctgtctggtccattcagcctgcgctacggcgcacggcaagtacgacatccgcggtctgacgctcgagtcggacctcgctgtctgggccgcgcttcgaggcgtgcccttgccgcccgatccgcagcattttcgctggctcaacgccggcgctttccgccgtctggtgcacgaggcgcagtacttgccagagatcagtcgtgccgccaaacgcatcgctctggccgtggccacggggcaatacgtggtgtgcacgttgctcgattacaagacctttgggacgcgcacccattacttgcggcagctatgctcgatgaccgaggagctgtacctgcgcctggacggcaccctgtgcctgtttctggagcccgaggagcgcgaactcatcggccgctgcctgccggcggccctgtgccgcgggttgcccgtcaagtaccggacgcaccgcgccgccgtttttttccacgccacgtttatggcgcgagccgaagcggcattgaaggacctctacgcggccttttgcgagtgcggcgacgggcgcgacaacggcggtaaccacgacggtaaccacgacggcaatgaccactcctctttgtcgccctccgcggtggcgtcccaccattcccgtttggagcacgccgagctgaggctggagcgcaaccgacacctgggcgcgtttcacctgccggcgatccgccacctcacggccggcgacgtggcccgcgtccaggacagcgtatcacgtgacctgggcttcgccgactggtcgcagacgctgatcgacgactactttctgctccccgcgggctgggcctgtgccaacccgcgtcgcggctacgccatgtacctggcctctaacgccgtgctggccctgcgtatcattcggctgctgcgcgccagtatacgtcacgagtacacggcgtgtatacgtatgttgagcggggacgtgcagcggctcatcaggctgtttaaaggcgaggctgcgctgctgcgcaagggactcgctcagaaccccgtgcaacgtcgagaactgtcgcggtttcgcaaacacgtccacgatctgaagcgcattcgcttcaccgaggacacgttcgtggagaccttctgcgactttctcgagctggtgcagcggattcccgactaccgcagcgtgtcgctgcgcatcaagcgcgagctgctgtgcctgcacgttttcaagctgcgccggggctgtcgcgcgccgccgacgcccgagacggcgcgcgtccagcgcctgctctggcactcgctgcgacacggggacgcgccgcaggatcgcacgcggctgccgcagttcagctcggcgctctcggacgccgagctgagcaaccacgccaaccgctgccgccgcaaggccccgctggaactcgggcccgccgtcgtcgccgccccggggccctcggtgcgctaccgggcccacattcaaaagtttgagcgtcttcatgtacgccgttttcggcctcacgaggtcggaggtcacgccacatgaagccgcggcggcgcgttataagcaccgtggggtcatcgaccgacaaggcgcggcgatgacgagtaggcgcgcacccgacggcggtttgaatttagacgattttatgcgccgccagcgcggtcgccacctggatctgccctatccgcgcggctacacgttgtttgtctgcgacgtggaggagaccatcctcaccccgcgcgacgtagaatactggaagctgctggtggtgacccagggtcagttgcgcgtcatcggcaccatcggactcgccaaccttttcagttgggaccgcagcgtggccggcgtggcggccgacggcagcgtgctgtgctacgagatcagccgtgagaactttgtagtgcgcgccgccgactcgctgccgcagctgctggagcgcggcctgctacacagctactttgaagacgtggagcgcgctgcgcagggcagactgcgtcacggcaaccgctcgggcctgcgacgcgacgccgacggccaggtcatccgcgagtcggcctgctacgtgagccgcgtgctgctacgtcaccgtgtgacgccgggcaagcaagaaatcaccgacgcgatgttcgaagccggcaacgtgccatcagcgctgttgccgtaacaaaataggaaggaaaaaacacgtgaaaaaaaaacccggagaagacagagaggacgagcgtccacacaccgctttggtcgtagacgcactttttattcttggtacattaaaaaaaaaacaacacatactttcctgtgactttctatcataaactgttccgccctgctgtttcgtcccaccatcagcaacagtattccccgctgtcgcggcggtcgcgacggtgacggtcccgctcgtcgcgttgaggatagtcgcgcggtggcagcgggggtggtggggatcggcagatttgttcggggtgattaccgttcgcttccataaacgctttaagagccatctcgcgtaacgtgtcttcttcgcgttcgtcgggggggacttggctaaagattttgagcagggtgacggaggagacacccgtgtgttcgaccggaatgtgtcgactcgagggctgcgcttgcaaccgcgccacgcatatgtcgcgggtgatgagtttctggcgcaggtgggtggcgcgcgggtcgcgcaacagcggatcgcgcaccataaactcgcctacgaggcgttgggagctactgctgccgccggtgtcaccgataataggtctgtcgggacaggccagcagacgcagggcgcagtacacgtagtcggtgcaaatgaaggcgtcctgctgacgcacgacgcgtaaaaagtcaaacaacgccggcgtgctcgcgtagagcgcgtagtcgtagttttgactgacggcccagtagatcacgtcactaagctgcgcgtagtcttcgcgcaacgacggcagttgtacatagatgaggtaacacagctccgagatgctctgcagctggtgctggagatagcagcgcagcacgcgaatggtgcgttgaaagtgcgtgatcataagctcgacgcctactaggaacgccagatcgttgagcgtgtgctcttcgcatatctcttcgaccgaaagcagccggagcatgccccggtggttctcgttgagccgctgcaggttttgccgatagaggtagagcgcgccgcgcgaggtgtagtgggcggtatagaagagcacgttgtaatcgcgtagcgtctggtaaacctcggtgagccgcggcgattcgggcgtgccgcgatgccgcagctcttcgtccagccgccgcagagacgtggcgtactggccgtccgtcactccttttcgtgacgtgagaaaatgaagcgctagcgcggccgcacgccccgaacggctctggttgttgacctgcgcggctacccggcgtaccgtgtcgccccgcacggtggtccgtatggcctccaccatgtggcgcgctttcttttgcgccacgtagtaatagttgatgatcaccgcgtgcgtgattatccgacgcgtgagatcgcgctcgccaggcgctacgttgtttaagacggggtcgacgaggctggtgagcgcgaaggccggcatgggtatgcattcgttgaggcggcggaggtgctgcacgtcaaagtcttgcagcacgaatttgagatactcgacgtgctgcggcgcgaccacgctgggctcgaagcccagattgtcggccacgctgacccggtaacattcgcgctcaaagtcttcgatgtcgctgtcgcagaaggaaaactcatcgccctcggcagcggacggctcacctggcgccacgggactggtacttctgctactgttactggtggtgcgactgctgctaccgccgctgctgctgttatcgtcgccaccgccgccggcgccgttctcgggcagcgagggcacactaggcggtcgcgagactttaggcgacttgccggccttgggtgtcgccggcgagccccgaggcgcgcccgctgcgatctgcggttgccgacgcgacgacgatcgtttcttttcgctcggtttcttggcggcgccggtgccgccggtctcgcgcacgagctcgaaggacgacggagcgtccgaggagacgctgtagggcgacaaaccggcctccatgcgatccagatcttccgtggcgctgcgcgcccgcgtgctcgtgaaaacgctgtcctccgcctcctcatccgccggcgtgtcctcgttgctcgaggggatataaatcaccgtcgagggttcgccagagcgacgtgacgagctgcgacgccgcgacgacatcctctcgtctgctgaggtgcgttcggctcagttgcttacctgcatacatggaggagacccgggcgggacgttatatagtgagggccggctccggcgggcaaaccgaagatacagcctcgggcgcggaaagtgtcctcgccacgctggccgcggtgaggacaagaagacggagcgtggtgtgcgacgggcccccgggctcgcccactgactcggcgcgtcacatgagcgatctggctagcctggcgctcacggccgagttcggcctgggctgtctggaagcttacgtgcgcatcaacgcaggccaggtgttgcccgtggtctggccgccgggctggaacctagtgctgcaggagatcgagacggacgaggacttcaaaccggaggacgtgaaggcttggagtcactacctgtgttgccagacgcgcctggccttcgtgggtcgcttcgtgaacgagggcgtgttgtcgccggatcagcagaagaagaccgctgtgtgcctcatctcggacgagggctatgttttttgctatgtacgcgaggacaccgccgtctactacctggcccgcaacctcatggagtttgcgcgcgtcgggctgcgcgccgtcgagaccctgcactgcatgcgctacctgacctcgtcgttggttaagcgctactttcgcccgctgttgcgcgcctggagcctcggtttggataccatggcgcgattaatcatccgccaccacgggcagttcatgccgttgacgtacccgccgggaacggaactgcgtctatgcaacctcaggtgtttcgaaaacagcgtggaaggcggtcacttgctgcgcaacatcaaaaccgctttcggaatgcgcgttctcggcctgggaaccgtcagcctcaagggcgagaacgcgccctttcctcacttgcgctggcccgtcgaccttatccccatcgtcgtcgcctataccggggccgtctacgcctgcgacgtgcgcgacgaccgctacatccgggtgggagataatctcaacacgttcatgtgtctgggacttaacctgctgtttgaaaaccgacgtttcagcggccacaacggcatctacgatcgcgtgcccgactgccccaaaggacgtcagcaccgttgactgtgacgccacgagtgacgacgacgctgcttggggcataaaacaccgacgctacttcccgtttgactcgcgtgccaattttttcgctgccaacgccgtcaaggccgcctcttctggccctccgccacccttcgctcgagcacggcggtgttttgccgtcgttttttttttccggatcggcccgatttctttttgtccaccgacgcgcgaccgcgatgtcggtaatcaaggactgttttctcaatctgctcgaccgctggaggcctcctaagacgtcgcgaccgtggaaacccgggcaacgcgtggccctggtctggcccaaagaccgctgcctcgttatccggcgtcgctggcgcttggtgcgcgacgaaggacgggatgcacagcgtctggccagctacctctgctgccccgagccgctgcgtttcgtcggcagcatctgcacctacaactttcttaaacacaagggcgatcacaacgtgccgtctgaactgtacctgggcgcctcgggcgccatgtacctgtggaccgaccacatctactctgactcgttgacctttgtggccgagagcatcactgaatttctcaacatcggtttgcgacgctgcaacttcatcaccgtcccagaggagctgccgcacaccgcctcgcttagagcgctggccggctgcatgcacatccacgcgttcgcgcagtggcgtgctacgtatcgcggccgactcatggtcatgggtgattacagcgtcattcgcgtctccacgattcggctgtacgactggagcgagattaacgactggagggtcatggtcggcagtaaccacgtggaacctttaggctggttggtgagcccctacgacgtgatcaacctcttcgtggacgactgtatgcgcgtctttgctgccaacaatcagcacgtttgcatcgtggccgacagtttgatggagtttgtgactcgcggcatgacacgctgccacgaaaatggcatttattacggaaccaggagcatgcggaagctaaataagcctacctgtccttacggagtggaccaccaactttttgacgacgcgtgaacccgcgtctcccacggaccgtgtgccttttttttccccgttcctgtaaataaaaagctgttttttatttttcatacgaaccgctcgagtcgcgtgtgttttgacggggctgggtggagagggaaggtcgcgccgccgcagcatcccgcatagcctctacaaactagcattctggtgagatacatgttcataaactctcacgggaaggctagttagacaggctatgggaagaaaccgtgtttcgcgtgccgaatacaaaagaaaaaagaccggaggcggggtgtttttagagcaaaaccttacagctttttaataaaaaacaaggtagtcaacataatcgttaacccttggggtctgctgttactgaatcttcttttcattttctttggcttgattttctttgtgttcatcagtcttttgtggttgctgatgttcgctgccatctccgtctgtaatcaaaacgtcatactccccggagtaatcttcgtctccgtcggtggtggaccccccctgactgagagttacgttcttgctgggggtggtattactaccatcagcgctggtactgggttgttccaccgtcacgctgcaaaaacacgataaccgcgttcacaatcacgttattttttgtatttcttacctgtgttgaattccccagattccgtttacctgcgcttcgatttctgagaaggtgccgccaaagccaccgtcaaggtcacggctagtaagctcaagatccatagcctccgagccatgctgaggtcttgtcggcgtcgctgctgacgaacgcgtctggctgtgtgccgttaaataccttgggtgacgacatctcgaggtcatgtggccgcttctgaaaaacaacgtagtccggacgggtcgcagatacgcggtttttcaacctcgacggtttacgcctcgcccccaacatgacgcgttcgggacgaaagacgacgtcaggggattcacggtatttagccatgcagcgtgcggcgcctctctcatggatccactgtcaccgtcgcgatgggaggtagccctgttccccagctcaccaccgtcactcaaggactcatgccatctgtgcgcatggactttcgggctcgccggcccttgcgccgcttggctttctacgcgccgcgagctcgtcggaggcttttccaaaatcatatacatccagaacagcgccgagtgctggtcggtgagggagacgaagagatgttgccggatctgccgatggagatcgacatcgtcatcgaccgacctccgcagcaacccctacccaatccgctggtgctactgctggacgatgttcccccccatgtacccggttttgctccttaccgcgtcccccgtccccaccccatgattcccgaagaacattgggaccagttttaaataaaaacattttatttacatctgtacaaggatcatataaaagtctgtatattcagtccattgtcagtatttttgtgctcaagttcagtgtagatttatggaaaatatgtagtccgtaccgcttggggctcaaagttcaaagtccgtcatgctggcatgcagaccaccatgtgcatgggcccaggcgacggcggaggagacggcgggaattctattaagtggggaggtcgtggaggcagcgggggtggtagtacccacattttgctctcccggatccaagggacgagcagccgccgcgtgcggataggcacctggacttcaatgtccttgtacgttaacaatttttctttttcctcctcttcctcagtgaattctggcaagagttcaaagccgcgtgggcatatcagaagccggccacagcgatagtaacagatgaggatgagcagcgatagggagacgagtataatagatacggtacctgtgattcccgcgcaggacacggaaaacaaatacatgtatctacgacccttgtcgagtatataagcttcctgcagtccgcatgtaagcactgccaagggggtcaggataacatagtccataaattcttctggtacgtcaccttcagatttgttgtaccattccaccgtggcgttgagggtatactgtctagggagcagcatgcagcgtatttcatttcccaacgactgaattctgacagtgtcgtgagaagcattagtaacccaatctttccatagctggcacatgccgaagaagagatatcccgaaactgtatttttacaagtgtcaattgtatggttataggcatttccagagtaccaataagtattgttgtcagcgcagttcagaagccagatggtagttagataggactcaccgcggttgatgcaactctccgttaggttagtcacgctccaattaccctccgtggaagagttagttgttgtgtttgctggagtgaatctgaatgcctcggttaagttggtgtagtttgaatgcagacccccgatggctgtgcgagtaactccgttggccccggtaaggagagatacaaagatggtatcggtattgttgcttcgagtgtcattgtttgttatcaactgtatccagtagtaatccagcatcaccagcatagcccgtatcccgagcatcttgccggacactgaacataacggcgtttgtatatataaagaccgttccaacgcaacattgaggtgtcattgacgtctttattgacgtggttttaccgcaacttcctcttttcgcaggttgaatgaggaacccgcgtagatccccaacgccggtttcatcataaaccaccgtgagaaccggcgcgggtttcaacacgaaaccgcgtcactcacggacgtaggttatttcgaaaacctacgttaatcctgaacgcgttttgtgtcacgcgtccccgcgactcacatctagctcgtcttctgacgctacccacgaatttcgtaaccgaatccgcttcagcgtttccattaaactggcgcaatccacttctgactgactcggtcgctcgatgcgcacggacccgtgatctaacacgaacatagtgtagtgggaattcgtggcgatggacgtcaaccgaccgcagaacccatcacgagtgcgtcgcgtgagaaacatgaccgtgttgacgggggcacgcggtaacctacgtcgaaacagctcatacagggcgttgctggtcatgacgaccggaccttgcgatagcgccacgcaaaggccaggttacgtaggtattgtttcaaggtggtaaagtagtgcaggaacgcgaatagcaaagcgcataaaagcagggctaggaggacactgctgatggtcatggtgttatagcgtttgttagctgtcgggtgatcagggacctcccccgaggaactgtcgtcaggtgaggtaacgctgatggggatttccaccgtccaattaccgtgtgtaacgcggcaggtgtagttttgattgcaaaagatggctacgtaacatccctgatggaaagtcccatccaaggtgggaagtagcggattgcattgaggctcgctatcctcgggcaccttatcaccgtaatgaataaaagtaatattaatttcccctggaaagaacccgtaagatgtacagaatgcttcagctctgttgtcattctggtttcggacaccgccctttaccactgggtgggtgacggggggttgaaacccgctataaatgacggaccattgagtgcaattacccttgagatagttcctttgtattgtagtatccccctcgctgatgtttttaattttaccgtcgatgtacgttttgttttgcttcaaccaactaatttcgtaattggggcccgtccatagtgtcaggttatccttgagctccattaaagtttccccgtcccacccaaatccctcgtaaccggctacaaaactaccgttttccgtggtattacactcgtgcgtccacgtcagcacgctctgtgaccggtaacccaacgcaatttccagctctaacaggttttgctcggtttggttaaaaataaggtcacctttggctctttccccgtccaggtaggtggggtaggccgccgagacgttagccatccaagaaatggtaccgttggcccgacttgacgctttatcgctggaattaacgtgataggtaaaaaagtgttgcccgtcaaaaatccccacaacggtcaacgtcatatgcgatgtatcatcgaaaatccccgtgtacccgtaacgcaacacgtgcattcccaccactctcaacatccacagcacaaacaacgtcagacaccacattgtcatcatggcgttttattaacagttcctcggacatgatcggcgttatatactttcagtccgcgttttgacccctcctatcttctttgatgatgtatcctcttagccgtgtgttgtttactcctcctcttcgggagaccgtgccggatccgacatcagtggctctgagtcctcccgaggaaagaaaagtcgtcgaaacagccagcacaaatcgtgccaaaatagaaggacggccgccttttttcttcttttgggaatctcggcgggcctctgggggccgcacggagcgcgacgtcgaggtagatgtttgcggcgcctgtggtaaaccgtggtgtcccaggatctcttagacacctgttcgtccagaatcaacatttccaaccgacagtgacggggtcggccgacgaagtgtgtgaagagcgcgtgatccatgctcgtggcaacggcgtgccgcgctcgtgtcaaagagacccgtccacgggggacatggccttcttatagcagcgtgaacgttgcacgtggcctttgcggttatccgttcagtcctcggtgcgtaaccgctggtatcgatgcggcaggcgaatgcgcagccgctgacacagtcgctgggggatccgtagggccaacaagaagaagaacagagtgatggctgagaccaacacgatgtctctcgccaaggtcgcggacagttcctcgtcggcgcttacggaggggtgtttggcgagcccggatccgggcggtctcggatatagcgagcccaatcggacgtagaggcgctcgattattttcgtcgtaccgttctcgcagcgtaaacagtcatagcggcccacggtaagattagtgaccatgcggctggtgtacagtttagtcacagggacggttcgcattttcagtccgtcttgcaagatgttagtggtgatgtcgctgaaattgcggatcaccgtgtcgttctggtacaaccacaggtcaaccacagactcgttatgctgccaagtaaaagccacgccgatgatctcgtcctcggtcacattctcgtagtagcagatagaaatacacatcccgtgtaacgtccacgtttccccaggatggatcgaggccaactccgtcacattcaagcggcaggtcgagttggaggacttgctacccaggtcaacagcacacgaggaagaggcagataagcaaagaacaaaaaacacccatcccagcggtaccgtacctcggcgacgctccatgccggcgcctaacggtcctttgtgcgcgctcctcataagtacccaggcttttgaccccagtcggtacctacgtcagcatggagcccggtgtccgaggaagaaggaggagaggacaacgaggtccccggtaagattaagggtaaacatccgaaacaggtttatccccgccaatattcccaataaaatacaaaacacgcgttccttgacatcgattcaaaatttattgtgcgcgataccgcatcgccaaccacgaacacagtccaaaaaccagaaacatgaaccacagcccaatgtccgccttctggtgatcggtccgcgtacaggcggacgtttcattcgccgaaccgcgtctggtaccgctactgtgggcgatgggaccgacgtcggagtcgcggcgttcgttggcgccgctgccgcgtcgggtaccgctgccgcagatgggcgcaccgacggcggagccgcgtcgctcgccggcgctcgtcatctgacattccgttttcctgccgtgactgcgaatcatccgcttcatggctctcctcgtttactcccgccgctgctcttcctcagagacggccgccgccgctaccgcagaggcttctcccgcggcagtttcctccgccgcctcgctttcctcctcggtgttcagacgccggtacgattcggaacaccagtagcacagcaggtggcagagggaggtcagggccaccgatcccgcggccagcaacccgatcttcggatccgtcagccagtaatccctccgtagatgatagcgccgcctagcgccgtcaactcgatgccggcggctgcagttgttgtccgcaatgctctggctgatgaagggcacgcacagttcgcgctcgtcctcctcgcacgagggcagcaaacccgaggtgccggggatgtagtggactacgcggtgccgttcaccctcccaaccgcagtttatactgcgcaacctggagggatcgggcgtccacaggtaccgcgtctgtgagcgcgatccgaaagccaggtcgcaggagcggtccgagtggcgcaggtcgtgcacgtcggccaccagcgccgtggtctcggtcgccaggctgtgggtctcgttgcccagcacgcaggtgtaggtgcccgcggtctcggtgatgagccgaaacgagaggctcagccgctgcgccgcgccgccgtcctcgaagcgccagcgcccgccggcgatgtaacagctggcgtcgttgtgtaacacctgaccgctgcgtgcgtccaccaccagcgaacgcacgatctcgggccagtagcagaggtggactcggatagagacctctggccagtcgtgcgcggggaagatgcaggccacctccagacggtcgccgtaaggcagcaactgcggtgagcccgggttccgctcgcggttgcggtcgcgcaccggctgcagacagggcgaacgcaccaccggaggcgcatcgaggcagcagttgccccactcgctccaggcgatcagtagcggcagccacagcggcggcagccgaccaccgcccatacctgtctgtgtttcagagctccttaaaaagaccacacgcgaccacatattatatataaggtgcgattggcagattatctttattggtagtgtttaacacgcataagcgaccggggatggggggaaataaaggaatggctcggtgtattctaaatcgtcatgggccgtcgaaccaggtagctcgagacccacagtcctaagcatagacgaaacagggcacgatgcgggggttctcggggcggacaggccacggtcagcgtatttgtcgtcattggcggcgattcacacggtccaccttcctcgttctcctcctgtgacctcctattcagttctccttgtcccgctggataagtgacctgcggctcttgaacctcatgatcatcatcatatcttcccgcattattccttctctcgtcgtttccacttgctcggctcccatcattcccttctctcgcgccctctctcgaaacgtcctccacttcttcacgttgagtgtgcgttgaatttcttgtctcctctcccgtaagctgttgacgtggttcctcgttctgccggagcaccgtgggtgccggcggtatgacggccagttcttgcgcttcggccgccgggttctgtctcggaacccacgtgcgacgccaaaacgtggttctttccacgaaccacgtacgtactcgcgtggccgtctggctcacgacgttgctttcctcccagcgggttctgatctggctagagacctgctgtgtccaaccgtggcaccgtaggcggaacagctgccagcggaccgtcagttgttggcgtagttgacggagtcccgcaccgccgggtcgcggtccgccggtgttgggaccgcttcccgcgggatgtctcagacgcccgcgtccgaaacaccgttggttggagaagcgtattcgcgtcaggagcagcgagtcccggctgcggaccgtcagagcgttatagcgccgtctttcgtgccgtcgccgcactgcgttctcactcgcgtcgtgcctgacggtgctttctgcactatgtggtgattcggtacgttctgcgtccgcgtctcgtgcatcctctgccggctgcgatggtggatccggaggggggaacgagggtctcggaatcgcattgcgcgactgatttcgccgccgttgttcttccaccagatactgcagctcttggtactgccaacgtatcccgtctcgcgacggcagttcgggtgatacggcgtgatgctgtgatgacggcggtctcaacggccgcggggaacgcacatcgtagacgggcaaatgcgggagcgatcccgaccaaagcggcggtcggtccaggtcaacggcgtttcgccgcgtcatgaccgacgctgctctgacttggaatccggcgtgctgcatggcttggcgcactatggacagctggtacgtcgctccttgtatctcccgtagccactcgtcctcctcgacaatgtccaagccgtgggcccactgcggccgctggaaaaggagtaagaatggcagtctacacagcagcagcgggagcagatgataacgcaagaagcgaccgcagtgggcccacagcatgctcttggtctttctagggccggtcaacagctttatgaagggaatcagggacgtcggctttggaaagccccctcggatcctttcggtatcgagagcgcgcctggcttcaaatacgtcaaaggcctgtccgccgcgccagctggcacggagttggcgtttcacagtgatttcatgcaatcatttcctacgcgacttgctcacagatcggtttgagggatgagcacgatgccgtgcttgtcatgctgccagagcagccacagcttttgcggtattcgaaagtagaaaatgataatgatgataataacgattacgaccgctaaaacccagagggcgtgtgtagccacgtgttggtactgtgggcttggttgtaacggtgtttccgctgctgtggctcctaaaccgacgtgaagttctacgtgggttttaggggtggtggattctttgggattggagtgtcgatgatgggtagtgcttgtcgtcgtcttcttggtggtagtggtggtcgttgtcgtgctcgtggtggttgttttctttgttgtggtggtagttgtcgttctcgtggtcgtagtgggttttttggtggtggtagtgggaagtgttccgttttgggtaacgtatacataataacatgtgtctaaagtccatttgttgccgtggttgtgccaattatgggactgatgtacgaatgtggtcatggtgcgatagtaatcagtatattcttccgttacattgatgagaaggagactgtgatttgtaagacatgaaaaacttcgattggtgtttttgtgaatttcgtctagccttggtgtatagcgacacattaatctattagctccacctccaccaaaagaccagtacacatagtcaccgtcatgcacatgtaccgcgttcaatgtgacgttagtacctactttagcaggtaccagaatgcatgcgtcgtggaaactgatgtagataccaaagaagcatgcgatcgctaggtaaagtaccttttcacgatgaaaggtaatgtacctgagcagcattctaccacaggtgatttccacatgttctcaggttccgtagggactgtccctatattcaaacagtgggtttgaaaccggagatatccgtccgctcacgataagtagtccgtagtgggcaggccgtcggttcctttgtaaaggtatcctctggtgtcccatttctctctgagtctttgaggaatcttgaagaaaaataaaatgacgactatgataatgatgatgacaatgaggatccatgcgctgtgtgcggcatctttggctctatgtgcctctacgttaccggtaaacgagtccgcaaagcctttcggcagacccgttacattgtaatctctaggtgacgttcttcgcgtggatcttttgtgctgcgtatgtttatttggcgtggtttttaatcgcgacaacgtagttttttgtccgggttttctggtggttgtcgttctggaaatcagtgataacgtaaaacatgtgggaaattcacagttaccgtttggtggacattttcgcctgcaatagtttttgggatctgagacgtttacatgaagaatgcttaatgtggaattgtgacactcgtacaacagtggtgatggtaacggagtggttttcattgtctttcgtctaccaggtttaggagggtcgtaggtgcagataggatgcgtattttcgccgttgctaatgccgacgcatgactggttataccagtgtactttttgtcctggatgataaccatgtccactaccgagggtaactggatcacctactctgacagtgacctccatacaggtttcggaatacctgtaaaatatcattgcggtcatgacggaccatcggaaaagatcatggttcacgatatggttaatcagtcgccgcataacacaaacacctgttgtataatcacgtatatgtacgtcattatgtttacggtattcaaacagtgagctgaaaaataaacgtacatggccattctttttacgttttagttttctcgacggtgattctttaagcggcggtgagcatactgttgtatcggtattgtgtgaatttattccaagctttctggggaaatttgaaacaaattaaaacgataattgttgtaacgataactaagggtatgatccacattgtatgtggggtggcagtatcgtgttgtgcttcaacgttaccggcggcatagtggaccgcggtatgtgttaagttggttgaggtaaatgatgatatagttaatgaattatatgtggacgtaggcggatagagcaatatagttgtgtggatgtgtgtttgatatatggaatatacagtgacattgtaacatagaggtgtccgtaatacccaaccatatgtgtatagagaatcgaagtagtaaatcccgctatagtgacttgttaaattaataagaaacaatgtatgattcaaaaaacatcgtcgtatagtatctggcttgctatctatttcttcaagtttttcagtataataacataacatgttaagggctttaagtgaatctttataccatgaaaaagtatagtctttagatgataatgcattactaggaggcagactgaggttttgaccttcatatcccgttttctgaatgcatgacgttgtatctggtttccaccattgatagaactgttgtatacgaagcaatattgttatccaccaaagcagccacgtgtatctatacattgtagttcatcacagctccgtgtccgtcataaatacttgtccgtactgtttattgtctttccagcgatcgtagactttttgaggtgctcgcagacagatgataataaaaatgatgagaattatggcaataattagcatccaagaataatgtgttttcgttctttgatattgtacttccccagctgggtattccacaggttgtggagtaaccgtagtcgcgttgctagggttaaccgcagtctccgtgcttctcaacagcgacgcactggttcctaacgttacccagtcactgctatttgtacgtgctgtattggcggcttccgtaagttcataatttccgttataattttccgatgcatatagcccagggttagtcattgttggcacaaaaccttctccctgataaaaagcacatcactataactttggtttactacataacaacttccaccatcccataatacaaacaactattagagctataaatacgataacacctaccaaggccaggtgcgtgttgttttcccgaggcgtctgatttaagaatccagcgacggcacgtagttgtggtgctaaactggcgttccccgtaacgttacttttcgtgccgatcaccgttggtgtcgtcgtgacgatggttgttacgttactagctgtagtagtttccaaaggtttcggtttcacggtcaaattataccacaggaacgtttcattttcgccgcttctcgtaaaaccttctgctccgtaacgaccggagtcgtttaacgtgaggttgaagatagtgatctggttagccgcacaacttaggcttaaacccacatagggcgtagaaagaccctctccacgtttgtaaaagcaaatgagatgactatcgttgccgtcccagcgaaaccaccgtgcgctgatgtttgaagtgaagttggataccagggtaacgttccctccctgtggcccagacacgtagatgatggattccagaatcacgggggtaaacaacgccaaaatcaacagtttattgtacatatgatgtattgtccaacgggattgtgtaaccgttagaagatgggagctcacgtcggaagccatgatttatttaccacgttacggtttggaaacagtcatgctcaaacagtgccttttatttcctacattaacaaaccacgttcttcatcgtccacgtggcttcgccagcgtcgccaagccgattgaggcaaacccaaatcaacgagcaccatcacggcggcgaacagcagcatcgcgacgccccagctgccgtaggtgaatgccaagttagttatgttcttggataacgtcccgtttccgacacgctgttgccgttgataactagcgtgtctaaacgcgctggaatttgtcgtcagtctcgacgcaacaagtgacacactgaatgtggagtttgtaaccaccgtgggtgtcattacggtggttgtgctttgaaccgctcgaggaaccaccgttaggttgaaacaagatagtgttatatgtttgtcggtgcagttgtaacctttttgataataagtgccaccactactttcagaaacgttataaataaaaaatgttttccaagaacagccaaacgctacacggtgtcctaatgagactcgcgtgcgtgatccccataaagtgcaccataatacgggtgtgcttccattctcgtaacgtccccactgggtcacattacagcttaacggtgccggaccgtgcaattcagcgtcttgacccgctgttgtagttatcgtgctacagttaggcagtcgattggatgtcacggcccagctcgtagagctttcagaggcacaaaccatcaaaatcagaaccagcgcgtatctggaaacccagactttattaaaaaggcagctcggcacgccccggggcgtgcgggcaaaagctaacatgttgagtgctacatatgtgcgtgagcgcgtattcaaacagtgagttaccaagcgcaccccagcccacccgttcatcttagcatgcattacccgtaaaagtccctcccaccccgtttcagactctctgactgaaaacaaatatgcaaaagcaaaacacaacaaactatacacagctggctaactagctacacggtagcgacgagacgttgatagcggtatttcagaggacgggcgatgtcccggagacggtctatgcagaaacgacagatggattgcggtacgcgaaacaggctggcgaaaagcgtcaaaagtcctagtaagacgaagccggtgacccaggtggtgtggaaaatcaggcctccgtagaactgcttagtgatgatgagacgactccacggaacgagttcttcctcccgcgacaacagcatcgatcgatcaggaggaggcgcgatcgccagggacggtgtacgggtgctcacgctggaggtgaatgctgctttgtcccttgatatagccttgttactctccgcctcggtgatgtcgtaacagcaggactcgaacgcggcacaatcatggagacgcaaaccgaccaaccacacaaaagacaacacgagctttaagcgtgatctagatacacgatacacagcaaggccgggatctacacagtcagagtagcctagaaacatgttagcgccgtagggacgcttaacatttcaaaagcaacgtaaacacaatagctacagccacgcggctctgtggaacttcacgtgcgttctttaggacacggtcaggttgtaacaagagtaataaaaggtgaaattcgcatcttcccttttaaaatagtactttccgctgttttccgtcgtcagatttagcaacgtcaagcggttataggtgcagttatacgtcaggttcgctacttcatatctgtaatgttgttcgttatagttgccctggagtttcgggaagaacgaacagatggacttatgaccccaccctaacaaccagtgcaaaaagtcttccgttttgttctgaagacctcgaaatgtaacgttgccgttgatggtccctgagtagttagcgcaagtaatattcttaggaatctgacggtcgggagacttccattccacgggagcagtcgtcgtgccgattgaacaagtcccaaaaacacaataacagtacgcggcaagtagtaccattggtaataatctccacgttctaagcatcataaccatactcagcctcacgatcaaaatattgcactgtcagtggcgataagcgatacaaaaacaaaaaaaagggacgtgctacaatccgagtcactttcaccgtacccggacaacggtgctttatggactcatcgcttaaggtgggatgtatttgcaagccaacagagacgacaatttcttcgccgagagaaccagcggctgcatcacgaggctggcatctgattccctgtgcctatttcactcttcatttatacatatccagacctcatgtgatacgaggatcatcttacggggaaaaacccttctcttatccagtcattgggtcccgtatcccttgagaattcctcactatcccccgagctggagcagaacaattccaaaccggatacgctacataccagccacacagggtgacgtttaccatggccgaagactcggtcgcgatccttatagtcgaagatgacaacgacgcatatccgtcgttcggcaccctacccgcctcgcacgctcagtacggctttcgactactgcgcggcatatttttgattacgctcgtcatctggaccgtagtgtggctcaagctgcttcgagacgctcttttataaaacacgcagaaaatctgtgtgttctgtgataacacgtcgatagtaatgtatacttcccctgaatgacgttatcataaactgtaccgtccaggggtacgctatgtgtcacgcgtgttctcatgcagcacattgtatgccgatacacgggggtaacgagggaaattccactcgcagatccgctttgtctggagacggagtaagaacacaacgacgtttaaagtaaatacaaatgaggcacatgatgcaaataaagatgatacatagcagtattctattgcgatccttcatgatggagtagaaaagcgggaccttacagtttttgagaaccgcacggagtaatcaaattttatcttggataaattagtgtcgatactttgtaatcacgctatgcgatttacgttgtttctagttcgtagtttgtgtctcagagttgccggaacgttaaagtggatcaaaacgtagatcataattaccgtcaccacggcggctgcccaaccagcgtgagtggatacgtgggaatttgtttgtttagaatgacgtgaagacaccacggtgataatatgcttggtgctatttatggtgtagttacagttatcgaagtaattgagtatttcatattcgttataagtagtaatgttacatgaaagatcacattcgtaaacgtgttcagtataagcacctgaatcgtttaatgttacattatataactgcagacctttagtttcgtttatgcacatgaattgcggggaacacgatgtgtttgtgtagtaatgtgtaacattgcgtagatatccgttccatccacaaagttcgcaattaccgtggtaccaaaagctggaataattacagggattattgctagcatctaggtagactgtgtctccctgcgttactgtaatgggtgcttctacatgttgactttgcagaaaaagtcgccagtaaaacgcctttttttgttcatgtaaaagtatgggcactagagtaccaattaggatgattacaaccggtattagtgcgactggcaataacaatttagtgttgcattgcatgcccatgtttttttgtttagtaatgattgaatataccgctttatatcataggttgttaacaaaaaaaaacagagacatgttattggttaaaaaaagtttattgatgtgcatgttaagccttagtccaaaattcatctggatcatatttgggaagtttggtgtaatgcggttttttgggaatgcgatggctacccatgtacaacgctataagcgccactgataccactacgcctgcccatacagcatgaattcccaggggaatgttagctttctcaatggtttttatgatgttacttccaatggtgttttcagtgttcctagattctttatatcttacagggcatgtgccaagagtggataacgttgtgtctccaattaacaccgttacgtagtaattttcttcttgaccgttatcacggtgatgcctggtatattttccagcgtttcttgtggttaagttgtagatagttagggaggtgtcgttgcagtcaaaacatatgtcgtgccgtggtgttgtttggtgatagttgcctaattcgcacattttatgcgtggggtactcataatgaatccagtctacattgtgccatttctcagtctgattgcattttttagagttatgttgccaccaacgtatcctgttacgttgattacctcgtaactgcggtcgcatcttttatggactgtataattgaaaccatcacaagtaacggtcgtggtggtgttggtacatgtggtagtctcaacgtttgtatttgtcgttgtggatatctgtgtggttgttttcgacggttttgtagaaacggtggttgctggtgcagttgcagtagagcaatttatagattctgaagtgcttttattgctgataactgttgtactgtatgttgatgtggctgtctcagtactagtggaatagttaacggtagtactacagggacattgacaggaacaggtttgattgcagctttctgataacgcggatattagtatcgtccacataaccgtaaatcgccagtccattgcaatattagttctcgctcaatgggcattaatattcctttgaacgctgagccttacagaatgttttagtttattgttcagcttcataagatgtctgcccggaaacgtagctcaatcttcatgttctgtgtgatatcgaacaatgaattctgattcactgacggtgtcttgcaacatatggtactttttgttaaaggctcgtcgtgcaaaaaacagaactatgcaggccatacaaaccaacacgatggtccatacggtgcggcttctttgcgagctatgatagagattacgtttgtggtgatgtgtattgttagtatgttgacttcctttctctctatcttcattttcgatatcggtgttgtatctagggcaaacgaaagtagcattaatagcttcagtatgattttttggtgttactaataggtagaaattttcatcttcgtgatgtcctgtgaagtaattttctttaaaacaacgtctgctgtacctgccggaattggtgatatttagatcgtacagatgtagttctgtgttgttgcacgaacgacataagtcatggtacagtgaaggtctttcatgttgagaatgacatacagtatgagaggtaaggatgcgtaaccaataccaagattgggtatgtgcgttcttacgatgacctagatgatgtccgtgtgtggatcgattgtaatgtcgtatccaggcgactgaaagacaatcccacgtagaattaccttttatggtgacattactcccttctattcctgttgtattagtttctttgaaacgtatgattgttgtctctgtgtgacaagcgttggaagagttagtacggttgtacgtggtgtacgttgtggcgctgcaatttgtaagccatggcgtgcttataagtgcagtattagtggatacgttgtgcgaagtttcatctgacgtgatagttacggtgattgttgtgttataagatgatgtagcgtttgctgttacgttggtaaaagataatatagtgttggtatttgttgaaatcaattctgtagtggcagccgtattggatatattagcatatgatgtattgaatgtagaatatacggttgtgaaagtactcaagtcggaggtaacgttggtgatgttgccaatggttgacgcttgtgaggtgacagatgtgtgtggcgtcgttgatgtgttgttattcggagtagaaaatacgctggtcacaaaggtggtagaagcagtgttgggtgatgtgatggatgcagtattggtagtagtactgttgcatgtaactctatgcagaatatagaatattatgattgtatacgccgtatgcctgtacgtgagatggtgaggtcttcggcaggcgacacgcatcttttactgtaaatccccgtccaccgtcaacaacaaaggttccgtatctaggtccgtccgcagatgttcagcgtcctgttccccgattcgttgcgatcgcaggaagcagatgaccagcgcgccaacaaagatcatcattcccgaaacccaggcgcaatggagtgagaggccggaccactggcgttttaaatccgagataattgcccggtctgcctcttgggaatccgtaaccacaactctccctggtcccggataaaagcatcgacgcgtttccaaggctcggcagaagctacgtgggtggatgatgaggtagaaagcctcgacatcgccggtatactgatcctgcaggaggtagactcccgtatctttaaccgtgagattgtacagcgtcagattttggcgcgtgcacgcgaacgccgcaccgccctgacgcgtggtttctttataggcgtctgtaatgatacaaagtggcggcatacgacgcatgtatctgctgtagatatcataacgctgccagactacgctgtgatggctagtgttaagcctggtaaccagcgtgcgtgtacggtcctcgcaggtggcacggtagttggcgagctttaggggttttttggttggttcgacggcgttcgatgaacttccctgagttgtgaacaaaaacagcgacgtgactatgacaagcgtgaggggggtgctgtaggtctgcatggtgcaaaacacgttctcgccttccttatcagacgttgtcgtcctcgtcctcttcgtcgtctgtgcccgtcggttcgatcaacggggagttatctttctgtctggagggtcggtatggaatccgttcgtagatgttctgctttttagccgcgtgttgttccagctttttgcgtgtcaggctccgataggccagacattgatctacctcggtgcccgtgttgtttttctcctcctcgcgcgcgtaaattacaaagaagaccaccagcaggactatcagcgtagccacgaacgagcccgcgccccaggccgagtatgcgcctagcatggtaatgggttctgtgatccggcatttgcacatcgcgtggcacttgctgccattgccggtattagatgatgtgttattcggactgcacttgcacgtcaaatgggtatcttctgatttcacgagacagttggtggcgactttggtttcggcgcagacggccacatagcttaccaagctgagtgccagaaagcacaccgcgtgcattacacgcggatacatattaaaacaccgtgttccacaagcaccgcacacgtcaatcctccccgcacggtcttcagcccgcccatgacatgatctccctcacgttacccttcaacaccctgtagtactctgtctcggcttccggtccccatgtcctaattataacaaaacaccgtgacactgtccatctccctgtctttttgcgccgccggtcccccccaaatcatgtctctagatgccgccggccaccaaccggaggcacggcggctattggattcggcattggtgcgccgcgtcttggcctgcatgatcatcgtcatcatgattgccattagcatctggatcctgacctacgtgctgtttctctaataagaaccccggcccctgacggtaattttcctttcttctccgtttctcctcagctgccgtacgtgatgcctcacggccatctccgacaggccctctccccgacctcctggacatgtgagggcttgttgctcctcctgggattgctggtgctcttctttcaccaccacaaccagtcggccgtggagaggcgtcgccgcgtctcgttcgtcgaggccgatcgactgccgcatgagagcgggtggtattcttccgatgacgacggagaccgggacggtgatgaggaaactggagagagccacaacagaaacagcgtgggactgtccgctgtttttagctgactggcgtgcgacctgtaaaccgttactcgggtctcaagatggtttggaagttgtgactcatcttcctgtgggtgatacccaaccggacgcgagtgttccataaaagccgggcgctccggcgagaccatgccatcctcgccttcggacgccccgctcctcttctctctcctctcctccccgctgccgcggccattgccgccgccgcccataccatcggcatgtcggccgacaaatcgcagctgtcttcgccgccgcagctgtagcagttaacgtcgccggcctccaggaggagatggcgctgtgcgtcgtctcttcgtcccgtctccctctgtggtcgtgggtggtgcgagagtacacgatgggtggctctcgtctcgggggaccacagggggaggggggtaatttattattcgtattactgtaattttgtatcgcttaatttgtttagagccgcacgcttgacaacgccttgtatagccttatttatcccgatgacttttttctccgtacaagaaatggacgtcacttgagcagacacagtttcatcgaccacgacagtctcatgatctgactacctctgacccgccaacgagaaaaccgaaaagtaaaagatgaccgcgccctcggagtccttttttccttttcaatcatgaaagcaagaggcagccgagagaatgccagtaagagacgaccatcgcagacacagtacgatactcatcttagaacgaaccagcgaataaccatcacacgtacagcagaatctcatgaactagtcaaccaacgtcataaaatcttcacacaatcgtttttgcgaacttttaggaaccagcaagtcaacaaaagactaacaaagaaaaaccatcttggaattaaaaaaagtagcatcgttaccttatgaaccagcagcattcagtatatacaccagatataatatatttattaatgtatcctctctttctcctgatgtaattttgtttttgtaaattcaattgttgaaagtctctccctgggggaattgcatatcttattgatgaagaagaaatccctgccatatgtgttgtcaaactatcattatttctctatatgggtattttttttctaagaagcaaaagactagcagcagccaaaataaacctgatgaaatctttaactgaactcccagtggtctgtgtgtatatttctgttggtggtcggttgtctgaacccgggtgggttgttcggaaacggcgggacggggaaacggatggaaacagcgtcgctatatacgtgacttttgatctaaacggacgtcgctaggctgacagtttacgaattgctaaacaagataggaacaaaacaagcggggctttgcctggtaggatttcctgtggaaacaataaccggatgtgattgtggctggtacataagctggttctggctgcaagcgcttttcactgcattaggtttggcgtttgcttttgcctgggaacgctatggctataacgggaaagaaccggtttggcaacattccattgtggggggggggtacttatagcgtgcctagctatgacgttgatatatgtggatgcggataatactcgtaatgagctaaaagcgacgactggtagtaattttaccattacgcataggaaagatccgttgacaactaagtggaaaaccgtttttggtaacaatggtgatcagtggttgtgcaacgttacgggtataggtaatgctactgtgaatagtaacgcaactatttgtgtgtcgagctgtggtcataatacgttggatttatgtaatttaaagtcgggagattctggcttcttcgatctgtctcgttggttcggtgaaaacatggatgaatacagtggtgatgtgtggcacttggaagtcagctaaatgttgtatcgcttagtgaattggtgttcttacagttttcatgtaataaactacgtgtaattcgttaaatttgtgtgtttttttgttagtattctgcgtaacggtggaataaaattgcgttgacctagttagatttcctgtgtagaacaatgaccggacgtgcttggactggtacatacgcaggggctggacgtggttaccggtcactggactcggtttcgctgtagctgtggttcaacctgaacatggctcccagagctgctaggaaccggtccagtcacattttttggtgggtggggggtactaaaaaagtgtttaatattggggtttaatgataaaatccaggttatggatatgaggaaactgaatacctcgcagggtcgaaatcttaccacagttgatgatagaagacggttttccatcgggtgggaaacatgggataacggtggtgactaataatggtacaacggtcgtcaatacaacagcctgtgtttcaagttgttcgcatacgtcgcttgtgctttgcaatatgacgcagcagactgattcgttgtacggagtgggtcatcggttgaatgacgaagaagatggtgaactgtggagagtttcggtttcttaataatcccatacgacatgtgttcatttatatctgaattttaggatgatgactatagtataactctggggaacaaatatcatacgttaatcactttaagttacgccgttaggaaaagaaaatcagtccgaatgaagcatagtcagccgaatgatacagcaatagcttgtttacaacgtgttcttttttacattatgaacgtgccttgctttttatacacacatggagacagaggtccctcagcccttgtcacgacaactccctttttctaaaccgtatgtgctccaaaccgtatctcctcatcgtcacgtgaaataccatgggaccccttttcgtcacacacgtctttccgcttacccaacgcgtcagcccgcgctcggcagagctaccatataaaaacgcaggggtttagcagcttccccagatcgctgctgccccggcgttctccagaagccccggcgggcgaatcggccggctggtcggtcggcgctcggacggatggggagaacggcggtgacttagccgcccgtggccgggagaagacggaggagccgagatgacaacagcagtcgtggaagggtcgccaagccccggtccttctcttctgtctggtcgaatcttgttttcttttttcaaccgctctttttgtcacctttttatgtgagtttctcttccgcgtctcccggccgtaccatccacccatgcagcatgcacgcgtgtatgtatgcatcgcctctcctccgtcccgactaccatcagcagtaccactgccgccacccccagcgccaccaccgctgccgtcgccaccgcgttatccgttcctcgtaggctggtcctggggaacgggtcggcggccggtcggcttctgttttattatttttttttattttttatcttctcctttccttaatctcggattatcatttccctctcctacctaccacgaatcgcagatgataaacaagagggtaaaaagaaaaaagctacagacatttgggtacctcagctttccgataactcgaagaattcaaagtcgacgattcccaacaagagaaaacagaacaaaaacaaggtcatttttatttatcctcatcgtcaacaacaactaccgacaacaacgaaacaccaccaagaatgtcaatccgcaagggtgttcctgccccctcgacgcgcctgtcgcgatcctcatggcgaggaccgcgatctccgtataggtagatgaaattatcccgtgtccggtcctgattccccgcatgccctgcacatcctgacgcgtcggtcagcagccaaacaatcataggaaatgaaccagaagaacaaaaagatcatctctctcggtgtatagcaacaccaacaacaaccgcatcgcaacatcttcatccgcaagacggaaagaaaacaacaataatgagaatgaaatcaccacaaccaagccagatttcacgtccatgagtttttattatattattatcaaaacgaaaaacagaaaaactgtcatagataaatataaaaaaaaatagaaaccacaaacgactactagtactccaatcttagatgtatatgctcctagataagatttagtattaccataatcatcgaagaatgaaagacgacgatgattccttaccgctcctgccacccggtctgtatgtagagagagaagagagaaaacggtgaatccaacatccccgggtcggcgtcggcatgccgctgatcgcagtggccccacctcggcatgccggcgccgggcgaggaattgctcatgaaaaaaagtatctttctgtaaaaaaagaaaacaatacatgattaaccgaaaagaaaccaacaaaaagaacccgagatcagtcgatttcgatcactacgataaacacatggaagatttcttgaaaaaagaaaagagaaagagaccaccttcccggcggcggacacgctcctctccgtcgccgttctgcaccatgattcgatcaataacaacatcatcatcggagaccatcttttaatcaatcagcgttgcagtagtcgactccctggacacgaaggagtcatccatttttatcctcgcacttcttcgctctcaaagccgcctttaaagttgaaatgaaaggatggaaacatggaatacggttttaattgcacgtatcaccattttactacaaaaagaaaaaaaaacaacttacacatagtattaccttaggtttacggataagtagagtgtaggcgtttttgaaacagttcagccgatgcaatcttgtctcggcataatcactctttctgcatataatagtagtagtagatttattcacatcaacacagcgaaaaactccagcatcaaagtacacctagagacagcccttaaaatatagtttgcagcttttagatgtacttacaccaaagaagattaccgtccttacgagaaaacagatactcggatataggaatcaagacagctctgcactgaaaacacactctcctgtcacgacaccgcgccacaccagaggcgtacgcgtgacttcatcgcaacgatccatcgtgatgtccctcgcagaacctaaaaagaccaaaaaaaaatcttggaccacagttgtcgatacttgaagacaatattctcgtgagaactttgagattcgcacttgaaacctcttaggatccacaaaaacaacaacctctgtatggaaaatgcgctgttttatctcagcttttctcccaaacctcggtttcttcctattcttatgttttccctagtatatttgcctccttataagaaaagaagcacaagctcggtcgcacggattattccttctgctaatctattattttgttccttttttttttctttgccttcaccctcttcactccctgtagcaacacagagtagtagacacaataaatgagaagtttgcatgcatttgtcgtgtccgtggtttgttatggcgtgtggagtgctcgggatgggtggacgtggggacggattcttgaggctacaaagatacgcggagacgtcgtggcgaggggatgggtttattggatatcggtgaagcagcgtggcggcgaaagacgcgatccctgggctggtagatccccctaccccgtctaccggggacgtttatcctttggacacgtaaatgtctcggccggcatccacgcgccacgttcaccgcgttgtgcccagcgccatgtgcgggtcgtttcggcgtgaagttggacggcgtagtttcggggattgtgaaccgtggctgagggtgtagatgggacaggaaaaagcgtgtgatctcaccgaggcgaagcatgtgggtggtgcgatgcggtggatgtggcggggtgcggcggtttccgacgtggagatgtggacatgggggtgatccggatgcgtggcaagaggcctcgagcttgggcttctcccgcggatggacgttctaactgtacacggcggccgtggcctccgagtaaaaaaaccaggtgctgacgccagacagagacgccgtcctcggaatcgtgtgcgcgaaagcctgtgccgcggcagcgtacgacgttccagtcagcgaggccgtcgcgttggcgcgccaacagtaaggtgacgacaggttggcggcccatggttccgaagcgtccccacatgcgccagcagtcggcgtcaaagtcgcttgcgctgtcggcccagtcgccaccgccgcggcggatttccgcgcgggggacggggtagccgagtgctgcgccctcgccaatgttgtgaagtggatgcgtgagttgatgttgattctctgtgggaaaatgagcgctgtcctgtgggttggtgttggggtatgcgagtagtaggggttgtgtttgatcgtagaggtgttggcgggcctgtgcgcgagcagcgtagtctgcggcgtcgagctccatctgtgtgcggtgttcttcgtcggcgtgtttgtccgaggttcggacatgcggttgtctgttgctgtggtgtaagggtgacgtgtgttgggcgtctgggtgaagcggcgtggtgtgggtgctgtttgtgtctgtggctggcatgattgtgcggcatgtgtgtgttgtagtgggtggaggttaaataggtgaggtgggttccctggtccgcgccgcaaactgtccccgtacccaacgtaacctcccctacgcggcgcgaacagccccggacccagcgcaacccccgtccccggccccgacaccgtcccgcacaccccccgtctccgcaacaccccggcatcgccggcggccagaacgctcgaaaacccccgacaagcgcagcgccgaaacgacacaggcaaggaccgtggaacgcaccggcagcgcgccgaaacaccgtcccgaagcccggtgccgacaacaaataccgtgggacgacacgcaccggcagtgcgcaggcagcgtcggacacaacacgcttacggccctcaacactccctcgaggacccaccacgcggccccgcacgtcggtgttttgggtgtgtcggggcgcggccggaaacgacacaggcaaggaccgtggaacgcaccggcagcgcgccgaaacaccgtcccgaagcccggtgccgacaacaaataccgtgggacgacacgcaccggcagtgcgcaggcagcgtcggacacagcacgcttacggccctcaacactccctcgaggacccaccacgcggccccgcacgtcggtgttttgggtgtgtcggggcgcggccggaaacgacacaggcaaggaccgtggaacgcaccggcagcgcgccgaaacaccgtcccgaagcccggtgccgacaacaaataccgtgggacgacacgcaccggcagtgcgcaggcagcgtcggacacaacacgcttacggccctcaacactccctcgaggacccaccacgcggcccggaatggacccaccacgcggcccggaatggacccaccacgcggcccggaatggacccaccacgcggcccggaatgggcggcccggaatggaccggcggtgttttgggtgtgtcggggcgcggccgggtgggtgtgtgccgggtgtgtcgcgggcgtgtgttgggtgtgtcgggggtgtgttggcagggtgtgtcagggtgtgtcgcgggcgtgtgccgggtgtgtcgtgccgggtgtgtcgcgggcgtgtggcgggtgtgccggcggggtgtggtggcggggtgtgtcggcggtgtgcgcggcctcggggtgtgcggcttcgcgggaacgagtgtgtggcctcgcggccgttatttcccccgcggtccccggggccgtcgtccctcgcccccgggcgttgcttttcgtgtgtccccagggacccatgctgccgtcccccgggaacttcctcttttccccggggaatcacacagacacacacacgcgtcttcttttcgccgtgcgcgccgcacgtcgcttttattcgccgtcgccgtcctccgcaccacacgcaactagtcgccgtccacacacgcaactccaagtttcacccccccgctaaaaacacccccccgcccctcgaggacccaccacgcggcccggaatggatgtcgggcgtccacctagatgggtgcgcgcccgggaggcggctgtgcgctccagtggtacgcgcctgccgcgcgtcttccttcgggtagctgcctttcccagtccacggccttccagactgcgtggcgccaaggcggcgccagcacgcgccgtgcacgtcgctgcctataaaagccagctgcgtgtcgcccgcggcacacgggcgacgaaggcgtccgcgtgtctaaaccgcgtgctcgctgacgcgggtctgcttcctatatagtggacgtcggaggtgtccggcgcccatggcccagcgcaacggcatgtcgccgcgccccccgcccctcggtcgcggccgcggggccggagggccttcgggggttggttcctctcctccttcttcttgtgtgccgatgggagcgccgtccacagcgggcactggtgcgagtgctgcggctacgacgacgccgggccacggcgtccaccgggtagaaccccgcgggccgccgggcgcccctccgagtagcggcaacaatggcaacttttggcacggcccggagcgcctgttgctgtctcagattccggtggagcgccaggcgctgacggagctggaataccaggccatgggcgccgtgtggcgcgcggcgtttttggccaacagcacgggccgcgccatgcgcaagtggtcgcagcgcgacgcgggcacgctgctgccgctcggacggccgtacggattctacgcgcgggtgacgccgcgcagccagatgaacggcgtgggcgcgacggacctgcgtcaactgtcgccgcgggacgcgtggatcgtaccggtggctaccgtggtgcacgaggtggaccccgcagccgacccgacggtgggcgacaaggccggccatcccgagggtctgtgcgcgcaggacggactgtacctggcgctgggcgccgggttccgcgtgttcgtgtacgacctggcaaacaacacgctgatcctagcggcgcgcgacgcggacgagtggtttcggcacggcgcgggcgaggtggtgcggctgtaccgctgcaaccggctgggcgtgggcaccccgcgcgcgacgctgctgcctcagccggcgctccgacagacgttgctgcgcgccgaggaggcgacggcgctcggacgggagctgcgccggcggtgggccggcacgacggtggcgctgcagacgccgggcaggcgactgcagccgatggtactgctgggcgcgtggcaggagctggcgcagtacgagccgttcgcgtcggcgccgcaccccgcgtcgctgctgacggccgtgcgtcggcacctgaaccagcgtctgtgctgcggctggctggcgctgggcgcggtgctgcccgcgcggtggctgggctgcgcggcggggccggcgacggggacggcggcggggacgacgtcgccgccagcggcgagcggcacggagacggaggccgccggcggggacgcgccgtgcgcgatagcgggagccgtggggtccgctgtacctgtgcctccgcagccgtacggcgccgccggcgggggcgcgatttgcgtgcctaacgcggacgcgcacgcggtggtcggggcggacgcggcagcagcagcggcgccgacggtgatggtgggttcgacagcgatggcgggtccggcggcgtcggggaccgtgccgcgcgccatgctggtggtgctgctggacgagctgggcgccgtgttcgggtactgcccgctggacgggcacgtgtacccgctggcggcggagctgtcgcactttctgcgcgcgggcgtgctgggcgcgctggcgctgggacgcgagtcggcgcccgccgccgaggccgcgcggcggctgctgcccgagctggaccgcgagcagtgggagcggccgcgctgggacgcgctgcacctgcacccgcgcgccgcgctgtgggcgcgcgagccgcacgggcagttggcttttttgctacgtccgggtcgcggcgaggctgaggtcctcaccctagccaccaaacacccggccatctgtgcaaatgtggaagactacctgcaagacgcccgacgccgcgccgacgctcaagctctgggactggacttggccacggtggttatggaggccggcggccagatgatacacaaaaagaccaaaaagcctaaaggcaaggaggatgaatcgctcatgaagggaaaacactcgcgctacacccgacccacagaaccaccgttgactcctcaagccagtttgggacgtgctttgagacgagacgacgaggattggaaaccgtcgcgtctccccggagaagattcctggtacgacttggacgagactttctgggttcttgggagtaaccgtaaaaacgacgtctatcaacgacgttggaagaaaacggtgttacgctgtggtttggagattgatcgtcccatgccaacggtccccaagggctgtcgcccgcagacttttactcatgagggcattcagttgatgggtggtgctactcaggaaccgctggatactggactgtatgctccttctcacgttacttctgcttttgttccatctgtgtacatgcctcccaccgtaccctaccccgaccccgctgccagattgtgccgcgacatgcgacgcgtcacgttttctaatatagccacacactaccattacaatgctcaataaactggttttcttttgcagctgtcgttatgtttcgaaaacttgttttacaatgttataacgacgccagtgataagtaccagacatccaattacaccgatgtggaactgttgcgacaatacgcgtaagatacagcggctatctgtactgcaagacgcatgattagcaatattattccccccccccccccccatacacgttgctttcgcgtcttttttctcgttgtacgcattacacaggtgttgttagactagcacagagacaccaattgctttaatactcgcgacgcttcatattagtatactaaactctgtgatgaacgacacatgcacaatacgataattgctacgtcacaataacacgcaccacggcttgcaaaactactaatacagatacgcaatgcatctaacaaccgtcgacaacatcccccccccccccatacttttacgaataaccactgttttattcttggcgccgattcagcgtgtgaaactcgtacagcgctcaacctgtttctatcaatgtccctctgcgtcccaccgtactttatacaccctacagtcacacccttcccaataggaacatcgacacatgaccgcacatattatagccagaaatacaaacgtagcgtacgcccaacggcaaacgcaactatttgcccccccccccccacacacgggactttcatactgaagtaccgttgtacgcattacacgggtttcgttcggataacaacactgcgtatctgcatatgtttcatcctcacacctcgccaccctttatgcgatacatacatccaaaaatgaaaaaccaggacacgcataatatgatactacatattttttttattgaaacatatcgctctggggctgggacgtttttagtcacacatcggcatcttcgtcaataaaacacacgccgccgtgacccataccgcagctcggacccatcgccccaagtcacggaaaagactgccgacgccgtgcgcggtttttccgtaatcgttcttcataccgccgaaggtgcgcatcacgctcttgtttcacgcgttgcacagcgacggtgaacaaaacgacgtagacgatgaaccgtacgaatcgcggcacaacgactggacgacgtcgtttacgaaattttaagaggaatttcagcataccccgggctctccatcgggagcggtaccgttttcccatgacgctccgtgaaaatcaccgacattgaagcgagacaaaaaagtggcattagcgacaccaacctcagccagacaagcatttttcggcgttgacagtggcccatggcagcgattcaagaggaggaacacctcttcttcgggacgatacaggccggcgggtaaggcgtcggagccccgatacatgctgccgacaggtaagatgcggctagtattaaggcctgaacgccaagcgaaggtccctctggctcggtccgcctgctctctccaggtccggactgagcgattccccgccaccactggtcccagaaggtccagctgcagatacccgtagaaatcatgaagctcacgataaacgagtccggagccatgcggaccaacgcggctgacagcacgagcggcaatccagacgagcagaccaaggacgttgatgagttgctctaagttcatcgccgtcgcatcgccccgaggcgctgctctgaagccaagtgccgacggcgctttggctttatgtttcaacgttcagccaagtcacggtggtttgacgtggtattgacgttcgtcccaagcgggttcgtcatgggccatgttgcaattatcagcgtcaccactgacgtgctaggaccgcggcacgtaaaacggaaaagtgaacggcaacaccagcgggtacatcatgagttgcctcatgataaaccgcgtcaatcccaacgagtcatgcacccgcacgcgtttggcatgcgggcggtatcccagtttctcgtaacccaccctctcggggaacctgaggctcatggtgcttttgcgccagagactcctgtgggaacccgctcaccactccgttcttatgcgattctctgactcgcgtaacatcctgcacgtcagtgaccaacccacgtcaattgtgacgctgatgatggggacatgtttcccgaacgtcaatcacacacatcacacggggatttacgctatgttgtttattgtcacgccgtgttcttacacgtaagtttcccggtgacggcgagggggtactccccctaactggaacaccacgcggtccggctcagcccgcgtgcgaagatcgtcctctcgccgttcccgtcgactgcaaaaccgccagccctcggaggcgtgctcgtatcccggcaagttgcgcggtgggggcgtgccccgcagaccccggttaatgcggtggtggtaggcccgcgagaaggcccgcacggtcttccaagcggggacctgttgctctggcgcttcgcccgaggaagacgccgacgactcgtcgtcggattctttgccgtcccactcggcgtataacgcgtgacacttccagtcctgacaaaaacaccacaaacggtgtaaccgccgcatctgtcgccgccaattggcggccctccgttcggctcgggtcgtgggtcgtcgctgaaaatggctgtcgtacacacaatagaggtgctctcgccagtcgccgcagtcgcaccacaggccgtgcgagtcgtggattacacgacgccagtcgcgttcggattcggatgtgtacatagccatggcgacggaagatgataaaaggacggtttggtctaagccggatgacaacgggtcgtctttttaaatccccgcagatatccggttgatgtagccagtcgcctacacgcgacttatcgattagtgttgttcaccccgtgtgtacacgccgtgggtgcgtagactgcagttactctcgtcaccgctactctggccgctgctagtgctactttccccacagttagacggagtgtatcgagctcgccggcggcgaaacaaccagcgccgggtactgtggcgcagtcgtttccaccaggtgaacttgctctccgcgacgaaaccggaggaagaggccgaggaacccgaggaatacgccgtaccccaacggccgcgcaaggcgtgatcacgccaggcgttgcagagacaccagcgatcgtgagaatcgcgaacccgggcctgccactggaccgccacgtattccagccagtgtgcgggctccggctgctcgcagtttggctcctcgtcctgaatctcaacgtggctctgccagttaccgcacgtacaccacaggttgtgcgagtagtcgactacgcgacgccaactctcttcgcgctccaagagcgacatgagatcgaacttgtcgggcggcggcctcgtctcaccgacgagacaccgaccgcactcgagagtaaagacaaatgagacgctgaaggccgcgatcagcctcccgtctctttatttttatacaggcggaaacacagacgaatactcggggggctgcgagggaaccgcaggaggagctgacgctacaggagggggcagcacaatcagctgatgtgtggacggaaagggtcgcgcctcaacgttccagaccagagcagactgtcgtttcttctcttcctgcagtttgccttcagaaacggcgtgcagccgccgagcccgtcgacgttgccgaagtaacatgtcgcgttgacactggagcgccgcggttcgcgatgcgtgatgtttgtcccggtgagacagtgctaacctcagccaacgctcgccaagtccgagagcgtccaccgccagaagcacgatgccggtccaccagatgatattgaggccggatccgatccacactacaaaagcgctgaggacgctgtatgtagaagacgtgcgggtcgcgggaggcacttcggcgttctttcccaacggcgtggacggtctccggtgacgttcgcaactgaaatcagaatccaacagctgttgtgtatttttttccccaggatacattaaccgtatactcaaatgctggttacgaataccgtacttggcgtcgccggtttgtatatatagagcccagcgaattccaccgttgacgtcgctttcattgtcttttcttatattttcctttgtaggacacccgagtccgctgagatggaaccgaagtcgctgccgttcgccagtaatatcgatatcttcgtagtccaactccacgacgacgggcccactgaagttaccttcgatgtctcccttggagaacgtcgcaccgtttcgaaggcggcactgttctccaatggatacgtttcgtccaacatcgacggtgcacccgttactcggaggtgtcaacaaccccagtatcggcagcacactgggaaaccacatccaggctatggtgaaccgcatctccatggtcttggccttcagagaccgcgccgtcgttgttgacgatgccgcaattcggggcggtaagaacggtacattcctgaaccgtagccgtcgatcgagcgggctccgggggttccccataagtagcgtgcgccacacacgttgtttctgaagctgtgtcaccgatgtcggatgacgtatataacagcagcgtgggtaccgtcactagtgacgtggcgtgacgaagctggtacggtggcggcggactgtcaggtatccgcgtggacggaaacggcggtagtgaccaggtggtcagtggcggcgacaaggccgcctgagccggtggctccttcttttccccaggtggtgcgactgacggtggcggcggcagacccagcatgcgccgaagacacagcttgacggcgcgatccaccttggaagtggacggcgataacgccacgcgtcgccagaaaagcagcgggtgacgcacggcttccatgggaacgagctccaacagcagcagagctaataaaaggacgcacaccagaagatccacacacagaccatgtagctcgttctccaagtcatgccggtggggccgggacggggtgggacgagagccggtaggacagcggcgcatacccacgccgccgtgggcggtgataaccagttgctcaggacactgcagaccgtagaaatacacttggtagggatcgcaacggctagggtctgtgcggccatcgtgcagttccaagcgccgagggtaggtgcgtttcggcgccgtgcagttgccgcgcccaaaattcacgcgtaaagcgttgccgtagctggcggtcccgtaaccgctcacgagtatcacgtacgcacgattacccccgcccaccatacaacaacccccgtagtaggcaacctcgcccataggtctccgaacaggtgtccagcgctgcaccccgttgagtttcacgaaactagggtagtgctcacactgagagaaaaaaaagttggtgctccattgggtgcccgtcacgcaggcgctggcgttcccgtagcgggtgcgcagccaacgtcgaccgtcccaacggtcgtacgtgggccgtcgaaattgacggtccactgaggtggcaggggacacggaagaatggaaagaggtgctgctgaagtaagacgtgtcattgttgtctcgtcgggttttcgacggcggagccggctcagagcggaccacggttgattgtgcccggaccgtgggcgcgacgaaacccaccgtcacggtccgagcacatccaaacgtgagccaccaccacccactgtagagccaccatcggaaacaccgcatgtttttctacatgatcctttcctacgtctttttccccataaacttttccggttcgctaatcgcacggaaatggtcgtgggtttaatatcgtgtatatcgggcacggggaaaagaggggcggacacggggtttgtacgaaaagaccgaggtagcgcttttttattacggtataatttgtgagacgcgacacacctcgtcggacagcgtgtcggaagatgtctctcttcggctcggcgagctccgacgcgaaaagcataacttcgtataatgtatgctatacgaagttattaattaagatccagacatgataagatacattgatgagtttggacaaaccacaactagaatgcagtgaaaaaaatgctttatttgtgaaatttgtgatgctattgctttatttgtaaccattataagctgcaataaacaagttaacgggcccgctagcttgccaaacctacaggtggggtctttcattcccccctttttctggagactaaataaaatcttttattttatcgatgcatggggtcgtgcgctcctttcggtcgggcgctgcgggtcgtggggcgggcgtcaggcaccgggcttgcgggtcatgcaccaggtgcgcggtccttcgggcacctcgacgtcggcggtgacggtgaagccgagccgctcgtagaaggggaggttgcggggcgcggaggtctccaggaaggcgggcaccccggcgcgctcggccgcctccactccggggagcacgacggcgctgcccagacccttgccctggtggtcgggcgagacgccgacggtggccaggaaccacgcgggctccttgggccggtgcggcgccaggaggccttccatctgttgctgcgcggccagccgggaaccgctcaactcggccatgcgcgggccgatctcggcgaacaccgcccccgcttcgacgctctccggcgtggtccagaccgccaccgcggcgccgtcgtccgcgacccacaccttgccgatgtcgagcccgacgcgcgtgaggaagagttcttgcagctcggtgacccgctcgatgtggcggtccggatcgacggtgtggcgcgtggcggggtagtcggcgaacgcggcggcgagggtgcgtacggccctggggacgtcgtcgcgggtggcgaggcgcaccgtgggcttgtactcggtcatggtaagcttaccggtcttaagctgcaggaattatcccgggttgtggcaagcttatcatcgtgtttttcaaaggaaaaccacgtccccgtggttcggggggcctagacgtttttttaacctcgactaaacacatgtaaagcatgtgcaccgaggccccagatcagatcccatacaatggggtaccttctgggcatccttcagccccttgttgaatacgcttgaggagagccatttgactctttccacaactatccaactcacaacgtggcactggggttgtgccgcctttgcaggtgtatcttatacacgtggcttttggccgcagaggcacctgtcgccaggtggggggttccgctgcctgcaaagggtcgctacagacgttgtttgtcttcaagaagcttccagaggaactgcttccttcacgacattcaacagaccttgcattcctttggcgagaggggaaagacccctaggaatgctcgtcaagaagacagggccaggtttccgggccctcacattgccaaaagacggcaatatggtggaaaataacatatagacaaacgcacaccggccttattccaagcggcttcggccagtaacgttaggggggggggagggagaggggggggggggagaggggcggaattggccgccctagatgcatgctcgacctgcaggcggccgctttacttgtacagctcgtccatgccgagagtgatcccggcggcggtcacgaactccagcaggaccatgtgatcgcgcttctcgttggggtctttgctcagggcggactgggtgctcaggtagtggttgtcgggcagcagcacggggccgtcgccgatgggggtgttctgctggtagtggtcggcgagctgcacgctgccgtcctcgatgttgtggcggatcttgaagttcaccttgatgccgttcttctgcttgtcggccatgatatagacgttgtggctgttgtagttgtactccagcttgtgccccaggatgttgccgtcctccttgaagtcgatgcccttcagctcgatgcggttcaccagggtgtcgccctcgaacttcacctcggcgcgggtcttgtagttgccgtcgtccttgaagaagatggtgcgctcctggacgtagccttcgggcatggcggacttgaagaagtcgtgctgcttcatgtggtcggggtagcggctgaagcactgcacgccgtaggtcagggtggtcacgagggtgggccagggcacgggcagcttgccggtggtgcagatgaacttcagggtcagcttgccgtaggtggcatcgccctcgccctcgccggacacgctgaacttgtggccgtttacgtcgccgtccagctcgaccaggatgggcaccaccccggtgaacagctcctcgcccttgctcaccatggtggcgaccggtggatcctaggcctccaaaaaagcctcctcactacttctggaatagctcagaggccgaggcggcctcggcctctgcataaataaaaaaaattagtcagccatggggcggagaatgggcggaactgggcggagttaggggcgggatgggcggagttaggggcgggactatggttgctgactaattgagatgcatgctttgcatacttctgcctgctggggagcctggggactttccacacctggttgctgactaattgagatgcatgctttgcatacttctgcctgctggggagcctggggactttccacaccctaactgacacacattccacagctggttctttccgcctcagaaggtacctaaccaagttcctctttcagaggttatttcaggccatggtgctgcgccgaattgttaattaaggcgcgcc

SEQ ID NO: 10 - DNA, 9623 bp, Simian cytomegalovirus
tggatgggatatattactctgaaagaagagaaaagatcctgaatttgtatgccttgaacgagtggggaataatagatgattggcaagcttactcaccaggcccggggataaggtacccgagagtctttggcttctgctttaagctagtcccagtggacctgcatgaggaggcacgcaactgtgagagacactgtctgatgcatccagcacagatgggggaagatcctgatggaatagatcatggagaagtcttggtctggaagtttgacccgaagttggcggtggagtaccgcccggacatgtttaaggacatgcacgaacatgcaaagcgctagtgtcagcactttgcggttgggactttccgccagggactttccacagtgggtggatcggaggcggtacaggggcggtactgggagtggctttcccctcagagctgcataaaagcagatgctcgctggcttgtaactcagtctcttactaggagaccagctagagcctgggtgttcgctggttagcctaacccggttggccaccgggggtaaggactccttggcttcatatagctcaataaacctgctcgcttagtcgctatattggagtcaagtgctcattgctgcgccgagcctctagaggtgaacctctcttactgggttctcctgtacccaggtgggagaaactccagcagtggcgcccgaacagggacttgagaagaggcatcggcaccgaccgctgagttgctgagcgtcggagagggacgactcaggtagggtgagagcctacgagttttttgctacctagtcagcgagaaaggctaggccgcgacaggggcgcgggtcccattagtggcaaccaacccagttggacgaagggttggtaggggacgggtcggagcaatgggcgggggtcactcagcactgtcagggagaagcctcgacacgttcgagaagattaggctacgtccgaacgggaaaaagaagtaccaaattaaacatttaatatgggcaggaaaagaaatggaacgatttgggttacatgagaaacttttagaaacaaaagaaggctgtcaaaaaatcatagaagttttaaccccgttggaaccgacaggctccgaggggctaaaagctctgtttaatttgtgctgcgtcatttggtgcattcacgcagaacagaaagtgaaagacacagaggaagctgtagtaacagttaagcaacactaccatctagtggacaaaaatgagaaagcagctaaaaagaaaaatgagacaacagcgccacctggtggcgaatcaagaaattacccagtagtaaatcagaataatgcctgggtacaccagcctttgtctccgcgcacgttaaatgcgtgggtcaaatgcgtggaggaaaaaaggtggggagcagaagtagtccccatgttccaagcactctcagagggatgtctctcctatgatgtaaatcagatgctcaatgtaataggagaccatcagggggcattacaaattcttaaggaagtcattaatgaagaagcagcagagtgggacaggacacacagaccaccagctggcccgttaccagcagggcagctaagagacccgacagggtcagatatagcaggaactaccagctcaattcaggaacaaatagagtggaccttcaatgccaatccaagaatagacgtaggggcacaatacagaaaatgggttattttgggcttacaaaaggtagtgcagatgtacaatccccaaaaggtcctagacattcgacagggacctaaagaacccttccaggactatgtagacagattctataaagccctgagagcagaacaagcaccacaggatgttaaaaattggatgacacaaactttgcttatccagaatgccaatccggattgtaaattgattctgaaaggattgggaatgaatccaaccttggaggaaatgctaatagcttgccagggagtaggagggccacaacataaggctaagctaatggtagaaatgatgagtaatggacagaatatggtccaagtgggacctcagaaaaagggcccccgagggccgctaaaatgctttaattgtggcaaatttggacatatgcaaagggaatgcaaggcaccaagacagatcaaatgctttaagtgcggcaaaattggccatatggcaaaagactgcaagaatggacaggcaaattttttagggtatggccattggggaggagcgaaaccaagaaattttgtgcaatacagaggagacacagttggtctggaaccaacagcccccccaatggaaacagcttacgatccagcaaagaagctcctccagcagtatgcagagaagggacagcgcctgagagaggagagagaacagacaaggaaacagaaggagaaagaagtggaggatgtttccttgagctccctctttggaggagaccaatgaaacgagtcatcatagaaggaacgccagtgcaagccttgttagatacaggagcagatgacactataattcaagaaaaggacttgcactttcccccacataaaccatggcgttccaaggtagtaggaggtataggaggagggattcatgtcaaagaatatcagggggtacaagtacaattggaggataaaatcatcaccggctcaattctaataggaagtacaccaatcaatattataggaagaaatattttagctcaggcaggcatgaaattagttatgggagttctatctagtcagattgaggaaacaaaagtacaactaaaagaagggaaagatggacctaaattgaaacaatggcccttatcaagagaaaaaattgaagctttaacagaaatatgcaaacaaatggaagaggagggaaaattatctaggataggaggagaaaatccttataatacaccagtgtttgccataaagaaaaaggataaaacacaatggagaatgcttgtagatttcagggaactaaacaaagctactcaagacttttttgaggttcagctgggaattcctcacccagcgggccttcagaaaaagaagcaaatcacagtaatagacataggggatgcctattattcaataccattatgcaaggaattcagaaaatatacagcatttaccatcccctcagtaaataatacagggccagggataaggtatcagttcaattgtctgcctcagggatggaaaggatctcctacaattttccagaatacggcagcaaacattttagaggagatcaaaaggcacactcctgggttagaaattgtccaatacatggacgatttgtggttggcgtcagaccatgatgagactagacataatcaacaggtagacatagtaagaaagatgctgctagaaaaaggtctagaaaccccagacaagaaagtccaaagagaaccgccatgggaatggatggggtataaattgcatccgaataaatggaccattaacaaaatagaattaccccccttagaaggagaatggacagtaaacaaaatacagaaggtagtaggagttctaaattgggcaagtcaaatttatccaggaattaaaaccaaacatacctgtgccatgttgagagggaaaaagaacctcctagaagaaatagtatggacagaagaggcagaggcagaatataagaacaatcaagggatagtgcaggaaacacaagaaggaacatactatgaccctctcaaagaattaatagcaacagttcaaaagcaaggagaagggcaatggacataccaattcacccaagaaggggcagtattaaaggtgggaagatatgccaagcaaagagaaactcatactaatgatctaaggactctagcacaccttgtccaaaaaatctgtaaggaagcacttaccatttggggaagacttccacgagtacaactcccagtagacaagaaaacatgggatatgtggtggcaggactattggcaagtatcctggataccagaatgggagtttgttagcacaccactcctagtaaaactgtggtattccttagtaaaagaaccaatcaaaggagaagatgtttattatgtggatggggcagcatccaaagtgaccaaattaggtaaggcaggatatctgtcagagagaggaaaaagtagaattagggaattagaaaacaccactaaccaacaagcagaattaacagcagttaagatggcattggaggacagtggagaaaatgtaaatatagtcacagattctcaatatgtaatgaacatcttgacagcatgtccacaggaaagtaactcacccttagtggaacagataatacaagccctaatgaaaaagaggcaggtctacttacaatgggtaccagctcataaggggataggaggcaatacagaaatagataaattagtaagcaaaggaataagacagatcctcttcttagatagaatagaagaagcacaagatgaccatgcaaagtaccataacaattggagaagtatggtacaggaatttggattacctaatatagtagcaaaagagatagtagcggcatgtcccaaatgccaaataagaggagaacctaagcatggacaggtagacgcctccattgaaacttggcagatggactgcacccatttagaaggaaaagttataatagtagcagtacatgtagccagtggattcatagaagcagaggtgatcccaagagaaactgggaaggagacagcacactttctgctgaaactgttagcaagatggccagtgaaacatctacacactgataatggcccaaactttacctctcagaatgtggcagcggtgtgctggtggggtaatatagagcacaccactggaataccttataacccacagtcacagggtagtgtagaaagcatgaacagacagctcaaggaaatcatctctcaaataagagatgattgtgagagattggagacagcagtgcaaatggctacgcatatccacaattttaaaagaaagggaggaatagggggtatctctagtgcagaaagattggttaatatgctaacaacacaactagaactaaatactctacaaaaccaaatccaaaaaattttgaattttaaggtctactacagagaaggtagagatccagtgtggaaaggaccagcgcgactcatctggaaaggagaaggcgcggtggtaattaaagagggggaagacatcaaggtagtccccaggagaaaggctaagattatcaaagattatggagagagaaaaacaatggatagtgagggtagtatggagggtgtcagagaggcaaataagcagatggagggggatagtgacttacaagatcaggaataaacaattgccttgggaatacagacatcattggcaggtgcaatggcagttttggacctacagccagttcattatccccttatcaaaagatgattacatagaagtgaatatttatcacaacctcaccccagaaagaggatggctctcaagtcatggagtagggttatcctattaccatcaaaagggatataagacagaagtagatccaggaacagcagacagaatgatacacctatattattttaactgttttacagatagagccatccaacaggctatcagaggggagaagtatacgtggtgcacattcaaggaaggacataaaggtcaggtacaatcactgcaacttttggcactagttgcatatacaaatggcatcaggaagagatccaagagaacctttaccaggatggctggaaatctgggatctagacagggagccatgggacgaatggctacaagacatgctcagggatctaaacgaagaagccagaaggcactttggaatgaacatgctaatccgagtatggaattactgtgtagaggagggaaggagacataataccccatggaatgagataggctacaagtactatagaattgttcaaaagtctatgtttgtacatttcagatgtggttgtagaaggagaggacctttttccccttacgaagagaggagaaatggacaaggaggaggagccccaccccctcctccaggacttgcataggccattacaaccatgtactaataaatgctattgcaaaaaatgctgttatcactgtgagctttgcttcctgcagaagggcttaggagtgcgttatcatgtctctaggaaaagaagaaaaacaagcactcaagataatcaagaccctatacggcagcagtaagtatggggagattgcttataaaaatactaataatagcaatagggataagtataggaataggtaacctgtatgtgacagtgttttatggaatcccagtatggaaaaattcaacagttcaggcattttgcatgacgcccaataccaatatgtgggcaaccaccaactgcataccagatgatcatgataatacagaggtgcctctaaacattacagaagctttcgaggcttgggataatccgctggtaaaacaagcagagagtaatatacatctactctttgaacaaacgatgaggccttgtgttaagctctcccccatatgtattaaaatgtcctgtgtagagctgaatggtacagccacgacaaaggccaccactactgcaactacaacaatgactaccccctgtcagaattgcagtacagagcagatagaaggagaaatggcagaggaaccagcatccaactgcacttttgcaattgcaggatatcaaagagatgtaaaaaagaattatagcatgacctggtatgatcaggagttagtctgcaataataaaacaggaagtgaaaagggaagtaaggattgttacatgatacattgtaatgattcagtgataaaagaagcttgtgataaaacatattgggatactttaagagtaagatactgtgcaccagcagggtatgctttgctaaaatgtaatgataaggattatagaggctttgctccaaagtgcaagaatgtttcagtagtgcattgtactagattaatcaatactactataactacagggataggattaaatggtagtagatcagaaaatagaacagagatatggcagaaaggaggaaatgataatgatacagttataataaagttgaataagttttacaacttgacagtgagatgccgaagacctggtaataaaacagtgttgccagtaacaatcatggcagggttagtatttcactctcagaaatataataccaggttaaaacaagcgtggtgccacttccaaggagattggaaaggggcatggaaagaagtcagagaagaagtaaagaaagtgaaaaatcttacagaagtaagcatagaaaatatacatctgagaaggatatggggagatccagaatcagcgaatttttggttcaattgtcaaggtgaatttttctattgtaagatggactggtttatcaattatctaaacaatcgaacagaagatgcagaaggtactaataggacctgtgacaaagggaagccaggaccaggaccatgtgttcagagaacttatgttgcctgccatatacgacaagtagtaaatgattggtacactgtctctaaaaaggtatatgctccaccaagggaaggtcatttggagtgtaactcatcagtcacggcactatacgtggcaatagattataacaacaagtctggcccaataaatgtgaccctaagtcctcaggtacgcagcatatgggcgtacgaactgggagactataaattagtagagataacaccaattggctttgctcctacagatgtaagaagatatactggccccacaagagaaaaaagggtgccattcgtgctagggtttctaggcttcttgggagctgctggaactgcaatgggcgcagcggcaacaacgctgacagtccagtctcggcatttgcttgctgggatattgcagcagcagaagaacttgctggcggctgtggaacagcaacaacagttgttgaagctgaccatttggggtgtgaaaaacctcaatgcccgcgtcacagctctcgagaagtacctagaggatcaggcacggctaaattcatggggatgtgcgtggaaacaagtatgtcacaccacagtgccatggaagtataataacactcctaagtgggacaatatgacttggttggagtgggagagacaaattaatgccttggaaggcaacataactcaactattggaagaagcacaaaatcaggaatcaaagaatctggatctgtaccagaaattggatgattggtcagggttctggtcatggttctcactgtcaacttggttaggctatgttaaaataggatttttagtgatagtgattattctaggattaagatttgcatgggtattatggggatgtatcagaaatattaggcagggatataatcctctcccccagatccatatccacagttcagcggaacggccagacaacggaggagggcaagacagaggtggagaaagcagcagcagcaaattgataagattgcaggaagagtcctcaacaccttcgaggatcaacaactggtggctcaacttcaagagctgcagcttgagaataaggacttggtgttacaacatctgcctgaccctcctcatattcatcaggacagcagtgggatacctgcagtatgggctccagcaactccaagaggcagcaacagggcttgctcaagctctggcgagggctgcgagggaagcctggggcagactgggtgctattgtccgatccgcttatcgggcagtcatcaacagtccaagaagagtgcggcaaggccttgaaaaagtcctggggtaaaggtaaaatgactccagacggccgccgcctgcaagaaggagacacctttgatgagtgggatgatgatgaagaagaagtaggcttccctgtgcaacctcgagtccccttaagacagatgacctataaattagcagtggacttttcccactttttaaaatcaaaggggggactggatgggatatattactctgaaagaagagaaaagatcctgaatttgtatgccttgaacgagtggggaataatagatgattggcaagcttactcaccaggcccggggataaggtacccgagagtctttggcttctgctttaagctagtcccagtggacctgcatgaggaggcacgcaactgtgagagacactgtctgatgcatccagcacagatgggggaagatcctgatggaatagatcatggagaagtcttggtctggaagtttgacccgaagttggcggtggagtaccgcccggacatgtttaaggacatgcacgaacatgcaaagcgctagtgtcagcactttgcggttgggactttccgccagggactttccacagtgggtggatcggaggcggtacaggggcggtactgggagtggctttcccctcagagctgcataaaagcagatgctcgctggcttgtaactcagtctcttactaggagaccagctagagcctgggtgttcgctggttagcctaacccggttggccaccgggggtaaggactccttggcttcatatagctcaataaacctgctcgcttagtcgctatattggagtcaagtgctcattgctgcgccgagcctctagaggtgaacctctcttactgggttctcctgtacccaggtgggagaaactccagca

SEQ ID NO: 11 - protein, 1472 aa, Simian immunodeficiency virus
MGGGHSALSGRSLDTFEKIRLRPNGKKKYQIKHLIWAGKEMERFGLHEKLLETKEGCQKIIEVLTPLEPTGSEGLKALFNLCCVIWCIHAEQKVKDTEEAVVTVKQHYHLVDKNEKAAKKKNETTAPPGGESRNYPVVNQNNAWVHQPLSPRTLNAWVKCVEEKRWGAEVVPMFQALSEGCLSYDVNQMLNVIGDHQGALQILKEVINEEAAEWDRTHRPPAGPLPAGQLRDPTGSDIAGTTSSIQEQIEWTFNANPRIDVGAQYRKWVILGLQKVVQMYNPQKVLDIRQGPKEPFQDYVDRFYKALRAEQAPQDVKNWMTQTLLIQNANPDCKLILKGLGMNPTLEEMLIACQGVGGPQHKAKLMVEMMSNGQNMVQVGPQKKGPRGPLKCFNCGKFGHMQRECKAPRQIKCFKCGKIGHMAKDCKNGQANFFRVWPLGRSETKKFCAIQRRHSWSGTNSPPNGNSLRSSKEAPPAVCREGTAPERGERTDKETEGERSGGCFLELPLWRRPMKRVIIEGTPVQALLDTGADDTIIQEKDLHFPPHKPWRSKVVGGIGGGIHVKEYQGVQVQLEDKIITGSILIGSTPINIIGRNILAQAGMKLVMGVLSSQIEETKVQLKEGKDGPKLKQWPLSREKIEALTEICKQMEEEGKLSRIGGENPYNTPVFAIKKKDKTQWRMLVDFRELNKATQDFFEVQLGIPHPAGLQKKKQITVIDIGDAYYSIPLCKEFRKYTAFTIPSVNNTGPGIRYQFNCLPQGWKGSPTIFQNTAANILEEIKRHTPGLEIVQYMDDLWLASDHDETRHNQQVDIVRKMLLEKGLETPDKKVQREPPWEWMGYKLHPNKWTINKIELPPLEGEWTVNKIQKVVGVLNWASQIYPGIKTKHTCAMLRGKKNLLEEIVWTEEAEAEYKNNQGIVQETQEGTYYDPLKELIATVQKQGEGQWTYQFTQEGAVLKVGRYAKQRETHTNDLRTLAHLVQKICKEALTIWGRLPRVQLPVDKKTWDMWWQDYWQVSWIPEWEFVSTPLLVKLWYSLVKEPIKGEDVYYVDGAASKVTKLGKAGYLSERGKSRIRELENTTNQQAELTAVKMALEDSGENVNIVTDSQYVMNILTACPQESNSPLVEQIIQALMKKRQVYLQWVPAHKGIGGNTEIDKLVSKGIRQILFLDRIEEAQDDHAKYHNNWRSMVQEFGLPNIVAKEIVAACPKCQIRGEPKHGQVDASIETWQMDCTHLEGKVIIVAVHVASGFIEAEVIPRETGKETAHFLLKLLARWPVKHLHTDNGPNFTSQNVAAVCWWGNIEHTTGIPYNPQSQGSVESMNRQLKEIISQIRDDCERLETAVQMATHIHNFKRKGGIGGISSAERLVNMLTTQLELNTLQNQIQKILNFKVYYREGRDPVWKGPARLIWKGEGAVVIKEGEDIKVVPRRKAKIIKDYGERKTMDSEGSMEGVREANKQMEGDSDLQDQE

SEQ ID NO: 12 - protein, 513 aa, Simian immunodeficiency virus
MGGGHSALSGRSLDTFEKIRLRPNGKKKYQIKHLIWAGKEMERFGLHEKLLETKEGCQKIIEVLTPLEPTGSEGLKALFNLCCVIWCIHAEQKVKDTEEAVVTVKQHYHLVDKNEKAAKKKNETTAPPGGESRNYPVVNQNNAWVHQPLSPRTLNAWVKCVEEKRWGAEVVPMFQALSEGCLSYDVNQMLNVIGDHQGALQILKEVINEEAAEWDRTHRPPAGPLPAGQLRDPTGSDIAGTTSSIQEQIEWTFNANPRIDVGAQYRKWVILGLQKVVQMYNPQKVLDIRQGPKEPFQDYVDRFYKALRAEQAPQDVKNWMTQTLLIQNANPDCKLILKGLGMNPTLEEMLIACQGVGGPQHKAKLMVEMMSNGQNMVQVGPQKKGPRGPLKCFNCGKFGHMQRECKAPRQIKCFKCGKIGHMAKDCKNGQANFLGYGHWGGAKPRNFVQYRGDTVGLEPTAPPMETAYDPAKKLLQQYAEKGQRLREEREQTRKQKEKEVEDVSLSSLFGGDQ

SEQ ID NO: 13 - protein, 219 aa, Simian immunodeficiency virus
MEREKQWIVRVVWRVSERQISRWRGIVTYKIRNKQLPWEYRHHWQVQWQFWTYSQFIIPLSKDDYIEVNIYHNLTPERGWLSSHGVGLSYYHQKGYKTEVDPGTADRMIHLYYFNCFTDRAIQQAIRGEKYTWCTFKEGHKGQVQSLQLLALVAYTNGIRKRSKRTFTRMAGNLGSRQGAMGRMATRHAQGSKRRSQKALWNEHANPSMELLCRGGKET

SEQ ID NO: 14 - protein, 118 aa, Simian immunodeficiency virus
MASGRDPREPLPGWLEIWDLDREPWDEWLQDMLRDLNEEARRHFGMNMLIRVWNYCVEEGRRHNTPWNEIGYKYYRIVQKSMFVHFRCGCRRRGPFSPYEERRNGQGGGAPPPPPGLA

SEQ ID NO: 15 - protein, 854 aa, Simian immunodeficiency virus
MGRLLIKILIIAIGISIGIGNLYVTVFYGIPVWKNSTVQAFCMTPNTNMWATTNCIPDDHDNTEVPLNITEAFEAWDNPLVKQAESNIHLLFEQTMRPCVKLSPICIKMSCVELNGTATTKATTTATTTMTTPCQNCSTEQIEGEMAEEPASNCTFAIAGYQRDVKKNYSMTWYDQELVCNNKTGSEKGSKDCYMIHCNDSVIKEACDKTYWDTLRVRYCAPAGYALLKCNDKDYRGFAPKCKNVSVVHCTRLINTTITTGIGLNGSRSENRTEIWQKGGNDNDTVIIKLNKFYNLTVRCRRPGNKTVLPVTIMAGLVFHSQKYNTRLKQAWCHFQGDWKGAWKEVREEVKKVKNLTEVSIENIHLRRIWGDPESANFWFNCQGEFFYCKMDWFINYLNNRTEDAEGTNRTCDKGKPGPGPCVQRTYVACHIRQVVNDWYTVSKKVYAPPREGHLECNSSVTALYVAIDYNNKSGPINVTLSPQVRSIWAYELGDYKLVEITPIGFAPTDVRRYTGPTREKRVPFVLGFLGFLGAAGTAMGAAATTLTVQSRHLLAGILQQQKNLLAAVEQQQQLLKLTIWGVKNLNARVTALEKYLEDQARLNSWGCAWKQVCHTTVPWKYNNTPKWDNMTWLEWERQINALEGNITQLLEEAQNQESKNLDLYQKLDDWSGFWSWFSLSTWLGYVKIGFLVIVIILGLRFAWVLWGCIRNIRQGYNPLPQIHIHSSAERPDNGGGQDRGGESSSSKLIRLQEESSTPSRINNWWLNFKSCSLRIRTWCYNICLTLLIFIRTAVGYLQYGLQQLQEAATGLAQALARAAREAWGRLGAIVRSAYRAVINSPRRVRQGLEKVLG

SEQ ID NO: 16 - protein, 223 aa, Simian immunodeficiency virus
MGSSNSKRQQQGLLKLWRGLRGKPGADWVLLSDPLIGQSSTVQEECGKALKKSWGKGKMTPDGRRLQEGDTFDEWDDDEEEVGFPVQPRVPLRQMTYKLAVDFSHFLKSKGGLDGIYYSERREKILNLYALNEWGIIDDWQAYSPGPGIRYPRVFGFCFKLVPVDLHEEARNCERHCLMHPAQMGEDPDGIDHGEVLVWKFDPKLAVEYRPDMFKDMHEHAKR

SEQ ID NO: 17 - DNA, 9181 bp, Human immunodeficiency virus type 1
ggtctctctggttagaccagatctgagcctgggagctctctggctaactagggaacccactgcttaagcctcaataaagcttgccttgagtgcttcaagtagtgtgtgcccgtctgttgtgtgactctggtaactagagatccctcagacccttttagtcagtgtggaaaatctctagcagtggcgcccgaacagggacctgaaagcgaaagggaaaccagaggagctctctcgacgcaggactcggcttgctgaagcgcgcacggcaagaggcgaggggcggcgactggtgagtacgccaaaaattttgactagcggaggctagaaggagagagatgggtgcgagagcgtcagtattaagcgggggagaattagatcgatgggaaaaaattcggttaaggccagggggaaagaaaaaatataaattaaaacatatagtatgggcaagcagggagctagaacgattcgcagttaatcctggcctgttagaaacatcagaaggctgtagacaaatactgggacagctacaaccatcccttcagacaggatcagaagaacttagatcattatataatacagtagcaaccctctattgtgtgcatcaaaggatagagataaaagacaccaaggaagctttagacaagatagaggaagagcaaaacaaaagtaagaaaaaagcacagcaagcagcagctgacacaggacacagcaatcaggtcagccaaaattaccctatagtgcagaacatccaggggcaaatggtacatcaggccatatcacctagaactttaaatgcatgggtaaaagtagtagaagagaaggctttcagcccagaagtgatacccatgttttcagcattatcagaaggagccaccccacaagatttaaacaccatgctaaacacagtggggggacatcaagcagccatgcaaatgttaaaagagaccatcaatgaggaagctgcagaatgggatagagtgcatccagtgcatgcagggcctattgcaccaggccagatgagagaaccaaggggaagtgacatagcaggaactactagtacccttcaggaacaaataggatggatgacaaataatccacctatcccagtaggagaaatttataaaagatggataatcctgggattaaataaaatagtaagaatgtatagccctaccagcattctggacataagacaaggaccaaaggaaccctttagagactatgtagaccggttctataaaactctaagagccgagcaagcttcacaggaggtaaaaaattggatgacagaaaccttgttggtccaaaatgcgaacccagattgtaagactattttaaaagcattgggaccagcggctacactagaagaaatgatgacagcatgtcagggagtaggaggacccggccataaggcaagagttttggctgaagcaatgagccaagtaacaaattcagctaccataatgatgcagagaggcaattttaggaaccaaagaaagattgttaagtgtttcaattgtggcaaagaagggcacacagccagaaattgcagggcccctaggaaaaagggctgttggaaatgtggaaaggaaggacaccaaatgaaagattgtactgagagacaggctaattttttagggaagatctggccttcctacaagggaaggccagggaattttcttcagagcagaccagagccaacagccccaccagaagagagcttcaggtctggggtagagacaacaactccccctcagaagcaggagccgatagacaaggaactgtatcctttaacttccctcaggtcactctttggcaacgacccctcgtcacaataaagataggggggcaactaaaggaagctctattagatacaggagcagatgatacagtattagaagaaatgagtttgccaggaagatggaaaccaaaaatgatagggggaattggaggttttatcaaagtaagacagtatgatcagatactcatagaaatctgtggacataaagctataggtacagtattagtaggacctacacctgtcaacataattggaagaaatctgttgactcagattggttgcactttaaattttcccattagccctattgagactgtaccagtaaaattaaagccaggaatggatggcccaaaagttaaacaatggccattgacagaagaaaaaataaaagcattagtagaaatttgtacagagatggaaaaggaagggaaaatttcaaaaattgggcctgaaaatccatacaatactccagtatttgccataaagaaaaaagacagtactaaatggagaaaattagtagatttcagagaacttaataagagaactcaagacttctgggaagttcaattaggaataccacatcccgcagggttaaaaaagaaaaaatcagtaacagtactggatgtgggtgatgcatatttttcagttcccttagatgaagacttcaggaagtatactgcatttaccatacctagtataaacaatgagacaccagggattagatatcagtacaatgtgcttccacagggatggaaaggatcaccagcaatattccaaagtagcatgacaaaaatcttagagccttttagaaaacaaaatccagacatagttatctatcaatacatggatgatttgtatgtaggatctgacttagaaatagggcagcatagaacaaaaatagaggagctgagacaacatctgttgaggtggggacttaccacaccagacaaaaaacatcagaaagaacctccattcctttggatgggttatgaactccatcctgataaatggacagtacagcctatagtgctgccagaaaaagacagctggactgtcaatgacatacagaagttagtggggaaattgaattgggcaagtcagatttacccagggattaaagtaaggcaattatgtaaactccttagaggaaccaaagcactaacagaagtaataccactaacagaagaagcagagctagaactggcagaaaacagagagattctaaaagaaccagtacatggagtgtattatgacccatcaaaagacttaatagcagaaatacagaagcaggggcaaggccaatggacatatcaaatttatcaagagccatttaaaaatctgaaaacaggaaaatatgcaagaatgaggggtgcccacactaatgatgtaaaacaattaacagaggcagtgcaaaaaataaccacagaaagcatagtaatatggggaaagactcctaaatttaaactgcccatacaaaaggaaacatgggaaacatggtggacagagtattggcaagccacctggattcctgagtgggagtttgttaatacccctcccttagtgaaattatggtaccagttagagaaagaacccatagtaggagcagaaaccttctatgtagatggggcagctaacagggagactaaattaggaaaagcaggatatgttactaatagaggaagacaaaaagttgtcaccctaactgacacaacaaatcagaagactgagttacaagcaatttatctagctttgcaggattcgggattagaagtaaacatagtaacagactcacaatatgcattaggaatcattcaagcacaaccagatcaaagtgaatcagagttagtcaatcaaataatagagcagttaataaaaaaggaaaaggtctatctggcatgggtaccagcacacaaaggaattggaggaaatgaacaagtagataaattagtcagtgctggaatcaggaaagtactatttttagatggaatagataaggcccaagatgaacatgagaaatatcacagtaattggagagcaatggctagtgattttaacctgccacctgtagtagcaaaagaaatagtagccagctgtgataaatgtcagctaaaaggagaagccatgcatggacaagtagactgtagtccaggaatatggcaactagattgtacacatttagaaggaaaagttatcctggtagcagttcatgtagccagtggatatatagaagcagaagttattccagcagaaacagggcaggaaacagcatattttcttttaaaattagcaggaagatggccagtaaaaacaatacatactgacaatggcagcaatttcaccggtgctacggttagggccgcctgttggtgggcgggaatcaagcaggaatttggaattccctacaatccccaaagtcaaggagtagtagaatctatgaataaagaattaaagaaaattataggacaggtaagagatcaggctgaacatcttaagacagcagtacaaatggcagtattcatccacaattttaaaagaaaaggggggattggggggtacagtgcaggggaaagaatagtagacataatagcaacagacatacaaactaaagaattacaaaaacaaattacaaaaattcaaaattttcgggtttattacagggacagcagaaatccactttggaaaggaccagcaaagctcctctggaaaggtgaaggggcagtagtaatacaagataatagtgacataaaagtagtgccaagaagaaaagcaaagatcattagggattatggaaaacagatggcaggtgatgattgtgtggcaagtagacaggatgaggattagaacatggaaaagtttagtaaaacaccatatgtatgtttcagggaaagctaggggatggttttatagacatcactatgaaagccctcatccaagaataagttcagaagtacacatcccactaggggatgctagattggtaataacaacatattggggtctgcatacaggagaaagagactggcatttgggtcagggagtctccatagaatggaggaaaaagagatatagcacacaagtagaccctgaactagcagaccaactaattcatctgtattactttgactgtttttcagactctgctataagaaaggccttattaggacacatagttagccctaggtgtgaatatcaagcaggacataacaaggtaggatctctacaatacttggcactagcagcattaataacaccaaaaaagataaagccacctttgcctagtgttacgaaactgacagaggatagatggaacaagccccagaagaccaagggccacagagggagccacacaatgaatggacactagagcttttagaggagcttaagaatgaagctgttagacattttcctaggatttggctccatggcttagggcaacatatctatgaaacttatggggatacttgggcaggagtggaagccataataagaattctgcaacaactgctgtttatccattttcagaattgggtgtcgacatagcagaataggcgttactcgacagaggagagcaagaaatggagccagtagatcctagactagagccctggaagcatccaggaagtcagcctaaaactgcttgtaccaattgctattgtaaaaagtgttgctttcattgccaagtttgtttcataacaaaagccttaggcatctcctatggcaggaagaagcggagacagcgacgaagagctcatcagaacagtcagactcatcaagcttctctatcaaagcagtaagtagtacatgtaatgcaacctataccaatagtagcaatagtagcattagtagtagcaataataatagcaatagttgtgtggtccatagtaatcatagaatataggaaaatattaagacaaagaaaaatagacaggttaattgatagactaatagaaagagcagaagacagtggcaatgagagtgaaggagaaatatcagcacttgtggagatgggggtggagatggggcaccatgctccttgggatgttgatgatctgtagtgctacagaaaaattgtgggtcacagtctattatggggtacctgtgtggaaggaagcaaccaccactctattttgtgcatcagatgctaaagcatatgatacagaggtacataatgtttgggccacacatgcctgtgtacccacagaccccaacccacaagaagtagtattggtaaatgtgacagaaaattttaacatgtggaaaaatgacatggtagaacagatgcatgaggatataatcagtttatgggatcaaagcctaaagccatgtgtaaaattaaccccactctgtgttagtttaaagtgcactgatttgaagaatgatactaataccaatagtagtagcgggagaatgataatggagaaaggagagataaaaaactgctctttcaatatcagcacaagcataagaggtaaggtgcagaaagaatatgcatttttttataaacttgatataataccaatagataatgatactaccagctataagttgacaagttgtaacacctcagtcattacacaggcctgtccaaaggtatcctttgagccaattcccatacattattgtgccccggctggttttgcgattctaaaatgtaataataagacgttcaatggaacaggaccatgtacaaatgtcagcacagtacaatgtacacatggaattaggccagtagtatcaactcaactgctgttaaatggcagtctagcagaagaagaggtagtaattagatctgtcaatttcacggacaatgctaaaaccataatagtacagctgaacacatctgtagaaattaattgtacaagacccaacaacaatacaagaaaaagaatccgtatccagagaggaccagggagagcatttgttacaataggaaaaataggaaatatgagacaagcacattgtaacattagtagagcaaaatggaataacactttaaaacagatagctagcaaattaagagaacaatttggaaataataaaacaataatctttaagcaatcctcaggaggggacccagaaattgtaacgcacagttttaattgtggaggggaatttttctactgtaattcaacacaactgtttaatagtacttggtttaatagtacttggagtactgaagggtcaaataacactgaaggaagtgacacaatcaccctcccatgcagaataaaacaaattataaacatgtggcagaaagtaggaaaagcaatgtatgcccctcccatcagtggacaaattagatgttcatcaaatattacagggctgctattaacaagagatggtggtaatagcaacaatgagtccgagatcttcagacctggaggaggagatatgagggacaattggagaagtgaattatataaatataaagtagtaaaaattgaaccattaggagtagcacccaccaaggcaaagagaagagtggtgcagagagaaaaaagagcagtgggaataggagctttgttccttgggttcttgggagcagcaggaagcactatgggcgcagcctcaatgacgctgacggtacaggccagacaattattgtctggtatagtgcagcagcagaacaatttgctgagggctattgaggcgcaacagcatctgttgcaactcacagtctggggcatcaagcagctccaggcaagaatcctggctgtggaaagatacctaaaggatcaacagctcctggggatttggggttgctctggaaaactcatttgcaccactgctgtgccttggaatgctagttggagtaataaatctctggaacagatttggaatcacacgacctggatggagtgggacagagaaattaacaattacacaagcttaatacactccttaattgaagaatcgcaaaaccagcaagaaaagaatgaacaagaattattggaattagataaatgggcaagtttgtggaattggtttaacataacaaattggctgtggtatataaaattattcataatgatagtaggaggcttggtaggtttaagaatagtttttgctgtactttctatagtgaatagagttaggcagggatattcaccattatcgtttcagacccacctcccaaccccgaggggacccgacaggcccgaaggaatagaagaagaaggtggagagagagacagagacagatccattcgattagtgaacggatccttggcacttatctgggacgatctgcggagcctgtgcctcttcagctaccaccgcttgagagacttactcttgattgtaacgaggattgtggaacttctgggacgcagggggtgggaagccctcaaatattggtggaatctcctacagtattggagtcaggaactaaagaatagtgctgttagcttgctcaatgccacagccatagcagtagctgaggggacagatagggttatagaagtagtacaaggagcttgtagagctattcgccacatacctagaagaataagacagggcttggaaaggattttgctataagatgggtggcaagtggtcaaaaagtagtgtgattggatggcctactgtaagggaaagaatgagacgagctgagccagcagcagatagggtgggagcagcatctcgagacctggaaaaacatggagcaatcacaagtagcaatacagcagctaccaatgctgcttgtgcctggctagaagcacaagaggaggaggaggtgggttttccagtcacacctcaggtacctttaagaccaatgacttacaaggcagctgtagatcttagccactttttaaaagaaaaggggggactggaagggctaattcactcccaaagaagacaagatatccttgatctgtggatctaccacacacaaggctacttccctgattagcagaactacacaccagggccaggggtcagatatccactgacctttggatggtgctacaagctagtaccagttgagccagataagatagaagaggccaataaaggagagaacaccagcttgttacaccctgtgagcctgcatgggatggatgacccggagagagaagtgttagagtggaggtttgacagccgcctagcatttcatcacgtggcccgagagctgcatccggagtacttcaagaactgctgacatcgagcttgctacaagggactttccgctggggactttccagggaggcgtggcctgggcgggactggggagtggcgagccctcagatcctgcatataagcagctgctttttgcctgtactgggtctctctggttagaccagatctgagcctgggagctctctggctaactagggaacccactgcttaagcctcaataaagcttgccttgagtgcttc

SEQ ID NO: 18 - protein, 1435 aa, Human immunodeficiency virus type 1
MGARASVLSGGELDRWEKIRLRPGGKKKYKLKHIVWASRELERFAVNPGLLETSEGCRQILGQLQPSLQTGSEELRSLYNTVATLYCVHQRIEIKDTKEALDKIEEEQNKSKKKAQQAAADTGHSNQVSQNYPIVQNIQGQMVHQAISPRTLNAWVKVVEEKAFSPEVIPMFSALSEGATPQDLNTMLNTVGGHQAAMQMLKETINEEAAEWDRVHPVHAGPIAPGQMREPRGSDIAGTTSTLQEQIGWMTNNPPIPVGEIYKRWIILGLNKIVRMYSPTSILDIRQGPKEPFRDYVDRFYKTLRAEQASQEVKNWMTETLLVQNANPDCKTILKALGPAATLEEMMTACQGVGGPGHKARVLAEAMSQVTNSATIMMQRGNFRNQRKIVKCFNCGKEGHTARNCRAPRKKGCWKCGKEGHQMKDCTERQANFLREDLAFLQGKAREFSSEQTRANSPTRRELQVWGRDNNSPSEAGADRQGTVSFNFPQVTLWQRPLVTIKIGGQLKEALLDTGADDTVLEEMSLPGRWKPKMIGGIGGFIKVRQYDQILIEICGHKAIGTVLVGPTPVNIIGRNLLTQIGCTLNFPISPIETVPVKLKPGMDGPKVKQWPLTEEKIKALVEICTEMEKEGKISKIGPENPYNTPVFAIKKKDSTKWRKLVDFRELNKRTQDFWEVQLGIPHPAGLKKKKSVTVLDVGDAYFSVPLDEDFRKYTAFTIPSINNETPGIRYQYNVLPQGWKGSPAIFQSSMTKILEPFRKQNPDIVIYQYMDDLYVGSDLEIGQHRTKIEELRQHLLRWGLTTPDKKHQKEPPFLWMGYELHPDKWTVQPIVLPEKDSWTVNDIQKLVGKLNWASQIYPGIKVRQLCKLLRGTKALTEVIPLTEEAELELAENREILKEPVHGVYYDPSKDLIAEIQKQGQGQWTYQIYQEPFKNLKTGKYARMRGAHTNDVKQLTEAVQKITTESIVIWGKTPKFKLPIQKETWETWWTEYWQATWIPEWEFVNTPPLVKLWYQLEKEPIVGAETFYVDGAANRETKLGKAGYVTNRGRQKVVTLTDTTNQKTELQAIYLALQDSGLEVNIVTDSQYALGIIQAQPDQSESELVNQIIEQLIKKEKVYLAWVPAHKGIGGNEQVDKLVSAGIRKVLFLDGIDKAQDEHEKYHSNWRAMASDFNLPPVVAKEIVASCDKCQLKGEAMHGQVDCSPGIWQLDCTHLEGKVILVAVHVASGYIEAEVIPAETGQETAYFLLKLAGRWPVKTIHTDNGSNFTGATVRAACWWAGIKQEFGIPYNPQSQGVVESMNKELKKIIGQVRDQAEHLKTAVQMAVFIHNFKRKGGIGGYSAGERIVDIIATDIQTKELQKQITKIQNFRVYYRDSRNPLWKGPAKLLWKGEGAVVIQDNSDIKVVPRRKAKIIRDYGKQMAGDDCVASRQDED

SEQ ID NO: 19 - protein, 500 aa, Human immunodeficiency virus type 1
MGARASVLSGGELDRWEKIRLRPGGKKKYKLKHIVWASRELERFAVNPGLLETSEGCRQILGQLQPSLQTGSEELRSLYNTVATLYCVHQRIEIKDTKEALDKIEEEQNKSKKKAQQAAADTGHSNQVSQNYPIVQNIQGQMVHQAISPRTLNAWVKVVEEKAFSPEVIPMFSALSEGATPQDLNTMLNTVGGHQAAMQMLKETINEEAAEWDRVHPVHAGPIAPGQMREPRGSDIAGTTSTLQEQIGWMTNNPPIPVGEIYKRWIILGLNKIVRMYSPTSILDIRQGPKEPFRDYVDRFYKTLRAEQASQEVKNWMTETLLVQNANPDCKTILKALGPAATLEEMMTACQGVGGPGHKARVLAEAMSQVTNSATIMMQRGNFRNQRKIVKCFNCGKEGHTARNCRAPRKKGCWKCGKEGHQMKDCTERQANFLGKIWPSYKGRPGNFLQSRPEPTAPPEESFRSGVETTTPPQKQEPIDKELYPLTSLRSLFGNDPSSQ

SEQ ID NO: 20 - protein, 192 aa, Human immunodeficiency virus type 1
MENRWQVMIVWQVDRMRIRTWKSLVKHHMYVSGKARGWFYRHHYESPHPRISSEVHIPLGDARLVITTYWGLHTGERDWHLGQGVSIEWRKKRYSTQVDPELADQLIHLYYFDCFSDSAIRKALLGHIVSPRCEYQAGHNKVGSLQYLALAALITPKKIKPPLPSVTKLTEDRWNKPQKTKGHRGSHTMNGH

SEQ ID NO: 21 - protein, 96 aa, Human immunodeficiency virus type 1
MEQAPEDQGPQREPHNEWTLELLEELKNEAVRHFPRIWLHGLGQHIYETYGDTWAGVEAIIRILQQLLFIHFRIGCRHSRIGVTRQRRARNGASRS

SEQ ID NO: 22 - protein, 86 aa, Human immunodeficiency virus type 1
MEPVDPRLEPWKHPGSQPKTACTNCYCKKCCFHCQVCFITKALGISYGRKKRRQRRRAHQNSQTHQASLSKQPTSQPRGDPTGPKE

SEQ ID NO: 23 - protein, 116 aa, Human immunodeficiency virus type 1
MAGRSGDSDEELIRTVRLIKLLYQSNPPPNPEGTRQARRNRRRRWRERQRQIHSISERILGTYLGRSAEPVPLQLPPLERLTLDCNEDCGTSGTQGVGSPQILVESPTVLESGTKE

SEQ ID NO: 24 - protein, 82 aa, Human immunodeficiency virus type 1
MQPIPIVAIVALVVAIIIAIVVWSIVIIEYRKILRQRKIDRLIDRLIERAEDSGNESEGEISALVEMGVEMGHHAPWDVDDL

SEQ ID NO: 25 - protein, 856 aa, Human immunodeficiency virus type 1
MRVKEKYQHLWRWGWRWGTMLLGMLMICSATEKLWVTVYYGVPVWKEATTTLFCASDAKAYDTEVHNVWATHACVPTDPNPQEVVLVNVTENFNMWKNDMVEQMHEDIISLWDQSLKPCVKLTPLCVSLKCTDLKNDTNTNSSSGRMIMEKGEIKNCSFNISTSIRGKVQKEYAFFYKLDIIPIDNDTTSYKLTSCNTSVITQACPKVSFEPIPIHYCAPAGFAILKCNNKTFNGTGPCTNVSTVQCTHGIRPVVSTQLLLNGSLAEEEVVIRSVNFTDNAKTIIVQLNTSVEINCTRPNNNTRKRIRIQRGPGRAFVTIGKIGNMRQAHCNISRAKWNNTLKQIASKLREQFGNNKTIIFKQSSGGDPEIVTHSFNCGGEFFYCNSTQLFNSTWFNSTWSTEGSNNTEGSDTITLPCRIKQIINMWQKVGKAMYAPPISGQIRCSSNITGLLLTRDGGNSNNESEIFRPGGGDMRDNWRSELYKYKVVKIEPLGVAPTKAKRRVVQREKRAVGIGALFLGFLGAAGSTMGAASMTLTVQARQLLSGIVQQQNNLLRAIEAQQHLLQLTVWGIKQLQARILAVERYLKDQQLLGIWGCSGKLICTTAVPWNASWSNKSLEQIWNHTTWMEWDREINNYTSLIHSLIEESQNQQEKNEQELLELDKWASLWNWFNITNWLWYIKLFIMIVGGLVGLRIVFAVLSIVNRVRQGYSPLSFQTHLPTPRGPDRPEGIEEEGGERDRDRSIRLVNGSLALIWDDLRSLCLFSYHRLRDLLLIVTRIVELLGRRGWEALKYWWNLLQYWSQELKNSAVSLLNATAIAVAEGTDRVIEVVQGACRAIRHIPRRIRQGLERILL

SEQ ID NO: 26 - protein, 206 aa, Human immunodeficiency virus type 1
MGGKWSKSSVIGWPTVRERMRRAEPAADRVGAASRDLEKHGAITSSNTAATNAACAWLEAQEEEEVGFPVTPQVPLRPMTYKAAVDLSHFLKEKGGLEGLIHSQRRQDILDLWIYHTQGYFPDWQNYTPGPGVRYPLTFGWCYKLVPVEPDKIEEANKGENTSLLHPVSLHGMDDPEREVLEWRFDSRLAFHHVARELHPEYFKNC

SEQ ID NO: 27 - DNA, 10359 bp, Human immunodeficiency virus type 2
tgcaagggatgttttacagtaggaggagacatagaatcctagacatatacctagaaaaagaggaagggataataccagattggcagaattatactcatgggccaggagtaaggtacccaatgtacttcgggtggctgtggaagctagtatcagtagaactctcacaagaggcagaggaagatgaggccaactgcttagtacacccagcacaaacaagcagacatgatgatgagcatggggagacattagtgtggcagtttgactccatgctggcctataactacaaggccttcactctgtacccagaagagtttgggcacaagtcaggattgccagagaaagaatggaaggcaaaactgaaagcaagagggataccatatagtgaataacaggaacaaccatacttggtcaaggcaggaagtagctactaagaaacagctgaggctgcagggactttccagaaggggctgtaaccaagggagggacatgggaggagctggtggggaacgccctcatacttactgtataaatgtacccgcttcttgcattgtattcagtcgctctgcggagaggctggcagatcgagccctgagaggttctctccagcactagcaggtagagcctgggtgttccctgctggactctcaccagtacttggccggtactgggcagacggctccacgcttgcttgcttaaagacctcttcaataaagctgccagttagaagcaagttaagtgtgtgttcccatctctcctagtcgccgcctggtcattcggtgttcatctgagtaacaagaccctggtctgttaggacccttctcgctttgggaatccaaggcaggaaaatccctagcaggttggcgcccgaacagggacttgaagaggactgagaagccctggaactcggctgagtgaaggcagtaagggcggcaggaacaaaccacgacggagtgctcctagaaaggcgcgggccgaggtaccaaaggcggcgtgtggagcgggagtgaaagaggcctccgggtgaaggtaagtacctacaccaaaaactgtagccagaaaaggcttgttatcctacctttagacaggtagaagattgtgggagatgggcgcgagaaactccgtcttgagagggaaaaaagcagacgaattagaaaaagttaggttacggcccggcggaaagaaaaagtacaggttaaaacatattgtgtgggcagcgaatgaattggataaattcggattggcagagagcctgttggagtcaaaagaaggttgccaaaagattctcagagttttagatccattagtaccaacagggtcagaaaatttaaaaagcctttttaataccgtctgcgtcatttggtgcttgcacgcagaagagaaagtgaaagatactgaggaagcaaagaaactagcacagagacatctagtggcagaaactggaactgcagagaaaatgccaaatacaagtagaccaacagcaccacctagtgggaaaagaggaaactaccccgtgcaacaagcgggtggcaactatgtccatgtgccactgagcccccgaactctaaatgcatgggtaaaattagtggaggaaaagaagttcggggcagaagtagtgccaggatttcaggcactctcagaaggctgcacgccctatgatattaatcaaatgcttaattgtgtgggcgatcaccaagcagctatgcaaataatcagagagattattaatgaagaagcagcagactgggattcgcagcacccaataccaggccccttaccagcaggacagctcagagacccaagagggtctgacatagcaggaacaacaagcacagtagatgaacagatccagtggatgtataggccacaaaatcccgtaccggtagggaacatctacagaagatggatccaaatagggctgcaaaagtgtgtcagaaagtacaacccaactaacatcttagacataaaacagggaccaaaagaaccgttccaaagctatgtagacaggttctacaaaagcttgagggcagaacaaacagacccagcagtaaaaaattggatgacccaaacgctgctaatacagaatgccaacccagactgcaagttagtactaaaaggactggggatgaatcccaccctagaagagatgctaaccgcctgccagggggtaggcggaccaggccagaaagccaggctaatggctgaagccctaaaagaggctatgggaccaagccctatcccatttgcagcagcccaacaaagaaaggcaattaggtattggaactgtggaaaggagggacactcggcaagacagtgccgagcacctagaagacagggctgctggaagtgtggcaagccaggacacatcatggcaaactgcccggaaagacaggcaggttttttagggttgggcccacggggaaagaagcctcgcaacttccccgtgacccaagcccctcaggggctgataccaacagcacctccggcagatccagcagcggaactgttggagagatatatgcagcaagggagaaagcagagggagcagagggagagaccatacaaagaggtgacggaggacttgctgcacctcgagcagagagagacacctcacagagaggagacagaggacttgctgcacctcaattctctctttggaaaagaccagtagtcacagcgtacatcgaggatcagccggtagaagtcttactagacacaggggctgatgactcaatagtagcaggaatagaattaggggacaattacactccaaaaatagtagggggaatagggggatttataaacaccaaagaatacaaaaatgtagaaataaaagtactaaataaaagagtaagagccaccataatgacaggagataccccaatcaacatctttggcagaaatattctgacagccttaggcatgtcattaaatttaccagttgccaagatagagccaataaaagtaacattgaagccagggaaagatggaccaaggctgaaacaatggcccctaacaaaagagaaaatagaagcactaaaagagatctgtgaaaaaatggaaaaagagggccagctagaagaggcacctccaactaatccttataatacccccacatttgcaattaagaaaaaggacaagaacaaatggaggatgctgatagattttagagaactaaataaggtgactcaagatttcacagaaattcagctaggaattccacacccggcaggactagccaaaaagaaaaggatctctatattagatgtaggggatgcctatttttccataccactacatgaagattttaggcagtatactgcatttaccctaccagcagtaaacaatatggaaccaggaaaaagatatatatataaagtcttgccacaaggatggaagggatcaccagcaatttttcaatacacaatgaggcaagtcttagaacctttcagaaaagcaaacccagatgtcattctcatccagtacatggatgatatcttaatagctagtgacaggacaggtttagagcatgacaaagtggtcctgcagctaaaagaacttctaaatggcctagggttttctactccagatgagaagttccaaaaagaccctccatttcaatggatgggctgtgaactatggccaactaaatggaagctgcagaaactacaactgccccagaaagacatatggacagtcaatgacatccaaaagctagtgggagtcttaaattgggcggcacaaatctattcaggaataaaaaccaaacacttatgtagactaattagaggaaaaatgacactcacagaagaagtgcagtggacagaactagcagaagcagagctagaagaaaacaaaattatcttgagccaggaacaagaaggatattattaccaagaagaaaaagaattagaggcaacaatccaaaaaagccaaggacatcaatggacatacaaaatacaccaggaagagaaaatcctaaaagtaggaaagtatgcaaagataaaaaatacccataccaatggggtcagattactagcacaggtagttcagaaaataggaaaagaggcactagtcatttggggacggataccaaaatttcacctgccagtggagagagagacctgggagcagtggtgggataactactggcaagtgacatggatcccagagtgggactttgtatctaccccaccactggtcaggttaacatttaacctagtaggagatcctataccaggcgcagagaccttctacacagatggatcatgcaatagacagtcaaaagagggaaaagcaggatatgtaacagatagaggaaaagacaaagtaaaagtattagaacaaactaccaatcagcaggcagaattagaagtctttcggatggcactggcagactcaggcccaaaggttaatatcatagtagattcacagtatgtaatggggatagtagcaggccagccaacagagtcagaaaatagaatagtgaaccagatcatagaagaaatgataaagaaggaagcagtctatgttgcatgggtcccagcccataaaggcataggaggaaaccaggaagtagaccatttagtaagtcaaggcatcagacaagtattattcctggaaaagatagagcccgctcaagaggaacatgaaaaatatcatagcattataaaagaactaacccataaatttggaataccccttctagtagcaagacagatagtaaactcatgtgcccaatgccaacagaaaggagaagccatacatgggcaagtaaatgcagaaataggcgtttggcaaatggactacacacacttagaaggaaaaatcattatagtagcagtacatgttgcaagtggattcatagaagcagaagtcatcccacaggaatcaggaaggcagacagcactcttcctattaaaactggccagtaggtggccaataacgcacttgcacacagacaatggccccaacttcacttcacaggaagtgaagatggtggcatggtgggtaggtatagaacaatcctttggagtaccttacaacccacaaagccagggagtagtagaagcaatgaatcaccacctaaagaatcagataagtagaattagagaacaggcaaatacaatagaaacaatagtactgatggcagttcattgcatgaattttaaaagaaggggaggaataggggatatgaccccagcagaaagactaatcaacatgattaccacagaacaagaaatacaattcctccaaagaaaaaattcaaattttaaaaatttccaggtctattacagagaaggcagagatcagctgtggaaaggacctggtgaactactgtggaagggagaaggagcagtcatagtcaaggtagggacagacataaaagtagtaccaagaaggaaggccaagattatcagggactatggaggaagacaggaactggatagtagtccccacctggagggtgccagggaggatggagaaatggcatgcccttgtcaagtacctgaaatacagaacaaaagacctagaggaggtgcgctatgttccccaccacaaggtgggatgggcatggtggacttgcagcagggtaatattcccactacaaggaaaaagtcatctagaaatacaggcatattggaacctaacaccagaaaaaggatggctctcctctcatgcagtaagattaacctggtatacagaaaagttctggacagatgttaccccagactgtgcagacatcctaatacatagcacttatttctcttgctttacggcaggtgaagtaagaagagccatcagaggggaaaagttattgtcctgctgcaactatccccaagctcataaagcacaggtaccatcacttcaatacctagccctagtagtagtacaacaaaatgacagaccccagagaaagggtaccgccaggaaacagtggagaagagaccattggagaggccttcgagtggctagagaggaccatagaagccttaaacagggaggcagtgaaccatctgccccgagagctcattttccaggtgtggcaaaggtcctggagatattggcatgatgaacaagggatgtcagcaagctacacaaagtatagatatttgtgcctaatgcaaaaagctatatttacacatttcaagagagggtgcacttgctggggggaggacatgggccgggaaggattggaagaccaaggacctccccctcctccccctccaggtctagtctaatgactgaagcaccaacagagtttcccccagaagatgggaccccacggagggacttagggagtgactgggtaatagaaactctgagggaaataaaggaagaagccttaagacattttgatccccgcttgctaattgctcttggctactatatccataatagacatggagacacccttgaaggcgccagagagctcattaaaaccctacaacgagccctcttcgtgcacttcagagcgggatgtaaccgctcaagaattggctaaacaaggagaagaactccttgcccagctgcaccgacccctagagccatgcactaacaaatgctattgtaagcgatgcagtttccattgccagctgtgtttctcgaaaaaggggctcggaatatcatatgagcgaaagggcagacgaagaaggactccaaggaaaactaagactccttcgccttctgcaccagacaagtgagtatggagcctggtaggaatcagctgtttgttgtcattttactaacaagtgcttgcttagtatattgtagccagtatgtgactgttttctatggcatacccgcgtggaaaaatgcatctattcccttattttgtgcaactaaaaatagagacacttgggggaccatacagtgcttgccagacaatgatgattatcaggaaataattttaaatgtgacagaggcttttgatgcatggaataatacagtgacagaacaagcagtagaagatgtctggcatctatttgagacatcaataaaaccatgtgtcaagctaacacctctatgtgtggcaatgaattgtagcagggttcaagggaataccacgaccccgaatcccaggacctcgagttccacaacctcgagaccacccacatccgcagcctccataataaatgaaacttctaactgcatagaaaacaacacatgcgcaggattagggtatgaggagatgatgcaatgtgagttcaatatgaaggggttagaacaagataagaaaaggaggtataaggacacatggtatttagaagatgtggtttgtgacaacacaacagctggcacatgttacatgagacattgcaacacatcaatcatcaaagagtcatgtgataagcactattgggatgctatgaggtttagatactgtgcaccaccgggctttgccctattaagatgtaatgataccaactattcaggctttgaacctaagtgcactaaagtagtagctgcttcatgcacaaggatgatggaaacgcaaacttctacttggtttggctttaatggcactagagcagaaaatagaacatatatctattggcatggcagagataataggactatcattagcttaaacaagtattataatctcacaatgcgttgtaagagaccaggaaataagacagttttaccaataacacttatgtcaggattagtgtttcactctcagccaatcaacacaaggcctaggcaggcatggtgccggtttggaggcagatggagggaagccatgcaggaggtgaagcaaacccttgtacaacatcccagatacaaaggaatcaatgatacagggaaaattaactttacgaaaccgggagcaggctcagacccggaagtggcatttatgtggactaactgcagaggagaatttctctactgtaacatgacttggttcctcaattgggtagaagacaagaaccaaacacggcgcaactattgccatataaagcagataattaatacctggcataaagtagggaaaaatgtatatttgcctcctagggaaggggagttggcctgtgaatcaacagtaaccagcataattgctaacattgacatagataaaaatcggactcataccaacattacctttagtgcagaagtggcagaactgtaccgattagaactgggagactacaaattaatagaaataacaccaattggcttcgcacctacagatcagagaaggtactcctcaactccagtgaggaacaaaagaggtgtgttcgtgctagggttcttgggttttctcgcgacagcaggttctgcaatgggcgcgcggtccctgacgctgtcagcccagtcccggactttactggccgggatagtgcagcaacagcaacagctgttggacgtagtcaagagacaacaagaaatgttgcgactgaccgtctggggaacgaaaaacctccaggcaagagtcactgctatcgagaagtacctaaagcatcaggcacagctaaattcatggggatgtgcgtttagacaggtctgccacactactgtaccgtgggtaaatgactctttatcgcctgactggaaaaatatgacatggcaggagtgggagaaacaagtccgctacctagaggcaaatatcagtcaaagtttagaagaagcccaaattcaacaagaaaagaatatgtatgaattacaaaaattaaatagctgggatattcttggcaactggtttgacttaacctcctgggtcaagtatattcaatatggagtgcatatagtagtgggaataatagctttaagaatagcaatctatgtagtgcaattgttaagtagatttagaaagggctataggcctgttttctcttccccccccggttatctccaacagatccatatccacaaggaccggggacagccagccaacgaaggaacagaagaagacgtcggaggcgacagtggttacgacttgtggccttggccaataaactatgtgcagttcctgatccacctactgactcgcctcttgatcgggctatacaacatctgcagagacttactatccaagaactccccgacccgccgactgatctcccagagtctaacagcaatcagggactggctgagacttaaggcggcccaactgcaatatgggtgcgagtggatccaagaagctttccaagcattcgcgaggactacgagagagactcttgcgggcgcgtggggatggttatgggaagcagcgcgacgcatcgggaggggaatactcgcagttccaagaagaatcaggcagggagcagaactcgccctcctgtgagggacagcagtatcagcagggagagtacatgaacagcccatggagaaacccagcaacagaaagacagaaagatttgtataggcagcaaaatatggatgatgtagattctgatgatgatgacctaataggagttcctgttacaccaagagtaccacggagagaaatgacctataaattggcaatagatatgtcacattttataaaagaaaaagggggactgcaagggatgttttacagtaggaggagacatagaatcctagacatatacctagaaaaagaggaagggataataccagattggcagaattatactcatgggccaggagtaaggtacccaatgtacttcgggtggctgtggaagctagtatcagtagaactctcacaagaggcagaggaagatgaggccaactgcttagtacacccagcacaaacaagcagacatgatgatgagcatggggagacattagtgtggcagtttgactccatgctggcctataactacaaggccttcactctgtacccagaagagtttgggcacaagtcaggattgccagagaaagaatggaaggcaaaactgaaagcaagagggataccatatagtgaataacaggaacaaccatacttggtcaaggcaggaagtagctactaagaaacagctgaggctgcagggactttccagaaggggctgtaaccaagggagggacatgggaggagctggtggggaacgccctcatacttactgtataaatgtacccgcttcttgcattgtattcagtcgctctgcggagaggctggcagatcgagccctgagaggttctctccagcactagcaggtagagcctgggtgttccctgctggactctcaccagtacttggccggtactgggcagacggctccacgcttgcttgcttaaagacctcttcaataaagctgccagttagaagcaagttaagtgtgtgttcccatctctcctagtcgccgcctggtcattcggtgttcatctgagtaacaagaccctggtctgttaggacccttctcgctttgggaatccaaggcaggaaaatccctagca

SEQ ID NO: 28 - protein, 1550 aa, Human immunodeficiency virus type 2
MGARNSVLRGKKADELEKVRLRPGGKKKYRLKHIVWAANELDKFGLAESLLESKEGCQKILRVLDPLVPTGSENLKSLFNTVCVIWCLHAEEKVKDTEEAKKLAQRHLVAETGTAEKMPNTSRPTAPPSGKRGNYPVQQAGGNYVHVPLSPRTLNAWVKLVEEKKFGAEVVPGFQALSEGCTPYDINQMLNCVGDHQAAMQIIREIINEEAADWDSQHPIPGPLPAGQLRDPRGSDIAGTTSTVDEQIQWMYRPQNPVPVGNIYRRWIQIGLQKCVRKYNPTNILDIKQGPKEPFQSYVDRFYKSLRAEQTDPAVKNWMTQTLLIQNANPDCKLVLKGLGMNPTLEEMLTACQGVGGPGQKARLMAEALKEAMGPSPIPFAAAQQRKAIRYWNCGKEGHSARQCRAPRRQGCWKCGKPGHIMANCPERQAGFFRVGPTGKEASQLPRDPSPSGADTNSTSGRSSSGTVGEIYAAREKAEGAEGETIQRGDGGLAAPRAERDTSQRGDRGLAAPQFSLWKRPVVTAYIEDQPVEVLLDTGADDSIVAGIELGDNYTPKIVGGIGGFINTKEYKNVEIKVLNKRVRATIMTGDTPINIFGRNILTALGMSLNLPVAKIEPIKVTLKPGKDGPRLKQWPLTKEKIEALKEICEKMEKEGQLEEAPPTNPYNTPTFAIKKKDKNKWRMLIDFRELNKVTQDFTEIQLGIPHPAGLAKKKRISILDVGDAYFSIPLHEDFRQYTAFTLPAVNNMEPGKRYIYKVLPQGWKGSPAIFQYTMRQVLEPFRKANPDVILIQYMDDILIASDRTGLEHDKVVLQLKELLNGLGFSTPDEKFQKDPPFQWMGCELWPTKWKLQKLQLPQKDIWTVNDIQKLVGVLNWAAQIYSGIKTKHLCRLIRGKMTLTEEVQWTELAEAELEENKIILSQEQEGYYYQEEKELEATIQKSQGHQWTYKIHQEEKILKVGKYAKIKNTHTNGVRLLAQVVQKIGKEALVIWGRIPKFHLPVERETWEQWWDNYWQVTWIPEWDFVSTPPLVRLTFNLVGDPIPGAETFYTDGSCNRQSKEGKAGYVTDRGKDKVKVLEQTTNQQAELEVFRMALADSGPKVNIIVDSQYVMGIVAGQPTESENRIVNQIIEEMIKKEAVYVAWVPAHKGIGGNQEVDHLVSQGIRQVLFLEKIEPAQEEHEKYHSIIKELTHKFGIPLLVARQIVNSCAQCQQKGEAIHGQVNAEIGVWQMDYTHLEGKIIIVAVHVASGFIEAEVIPQESGRQTALFLLKLASRWPITHLHTDNGPNFTSQEVKMVAWWVGIEQSFGVPYNPQSQGVVEAMNHHLKNQISRIREQANTIETIVLMAVHCMNFKRRGGIGDMTPAERLINMITTEQEIQFLQRKNSNFKNFQVYYREGRDQLWKGPGELLWKGEGAVIVKVGTDIKVVPRRKAKIIRDYGGRQELDSSPHLEGAREDGEMACPCQVPEIQNKRPRGGALCSPPQGGMGMVDLQQGNIPTTRKKSSRNTGILEPNTRKRMALLSCSKINLVYRKVLDRCYPRLCRHPNT

SEQ ID NO: 29 - protein, 521 aa, Human immunodeficiency virus type 2
MGARNSVLRGKKADELEKVRLRPGGKKKYRLKHIVWAANELDKFGLAESLLESKEGCQKILRVLDPLVPTGSENLKSLFNTVCVIWCLHAEEKVKDTEEAKKLAQRHLVAETGTAEKMPNTSRPTAPPSGKRGNYPVQQAGGNYVHVPLSPRTLNAWVKLVEEKKFGAEVVPGFQALSEGCTPYDINQMLNCVGDHQAAMQIIREIINEEAADWDSQHPIPGPLPAGQLRDPRGSDIAGTTSTVDEQIQWMYRPQNPVPVGNIYRRWIQIGLQKCVRKYNPTNILDIKQGPKEPFQSYVDRFYKSLRAEQTDPAVKNWMTQTLLIQNANPDCKLVLKGLGMNPTLEEMLTACQGVGGPGQKARLMAEALKEAMGPSPIPFAAAQQRKAIRYWNCGKEGHSARQCRAPRRQGCWKCGKPGHIMANCPERQAGFLGLGPRGKKPRNFPVTQAPQGLIPTAPPADPAAELLERYMQQGRKQREQRERPYKEVTEDLLHLEQRETPHREETEDLLHLNSLFGKDQ

SEQ ID NO: 30 - protein, 215 aa, Human immunodeficiency virus type 2
MEEDRNWIVVPTWRVPGRMEKWHALVKYLKYRTKDLEEVRYVPHHKVGWAWWTCSRVIFPLQGKSHLEIQAYWNLTPEKGWLSSHAVRLTWYTEKFWTDVTPDCADILIHSTYFSCFTAGEVRRAIRGEKLLSCCNYPQAHKAQVPSLQYLALVVVQQNDRPQRKGTARKQWRRDHWRGLRVAREDHRSLKQGGSEPSAPRAHFPGVAKVLEILA

SEQ ID NO: 31 - protein, 113 aa, Human immunodeficiency virus type 2
MTDPRERVPPGNSGEETIGEAFEWLERTIEALNREAVNHLPRELIFQVWQRSWRYWHDEQGMSASYTKYRYLCLMQKAIFTHFKRGCTCWGEDMGREGLEDQGPPPPPPPGLV

SEQ ID NO: 32 - protein, 87 aa, Human immunodeficiency virus type 2
MTEAPTEFPPEDGTPRRDLGSDWVIETLREIKEEALRHFDPRLLIALGYYIHNRHGDTLEGARELIKTLQRALFVHFRAGCNRSRIG

SEQ ID NO: 33 - protein, 130 aa, Human immunodeficiency virus type 2
METPLKAPESSLKPYNEPSSCTSERDVTAQELAKQGEELLAQLHRPLEPCTNKCYCKRCSFHCQLCFSKKGLGISYERKGRRRRTPRKTKTPSPSAPDKSISTRTGDSQPTKEQKKTSEATVVTTCGLGQ

SEQ ID NO: 34 - protein, 103 aa, Human immunodeficiency virus type 2
MSERADEEGLQGKLRLLRLLHQTNPYPQGPGTASQRRNRRRRRRRQWLRLVALANKLCAVPDPPTDSPLDRAIQHLQRLTIQELPDPPTDLPESNSNQGLAET

SEQ ID NO: 35 - protein, 860 aa, Human immunodeficiency virus type 2
MEPGRNQLFVVILLTSACLVYCSQYVTVFYGIPAWKNASIPLFCATKNRDTWGTIQCLPDNDDYQEIILNVTEAFDAWNNTVTEQAVEDVWHLFETSIKPCVKLTPLCVAMNCSRVQGNTTTPNPRTSSSTTSRPPTSAASIINETSNCIENNTCAGLGYEEMMQCEFNMKGLEQDKKRRYKDTWYLEDVVCDNTTAGTCYMRHCNTSIIKESCDKHYWDAMRFRYCAPPGFALLRCNDTNYSGFEPKCTKVVAASCTRMMETQTSTWFGFNGTRAENRTYIYWHGRDNRTIISLNKYYNLTMRCKRPGNKTVLPITLMSGLVFHSQPINTRPRQAWCRFGGRWREAMQEVKQTLVQHPRYKGINDTGKINFTKPGAGSDPEVAFMWTNCRGEFLYCNMTWFLNWVEDKNQTRRNYCHIKQIINTWHKVGKNVYLPPREGELACESTVTSIIANIDIDKNRTHTNITFSAEVAELYRLELGDYKLIEITPIGFAPTDQRRYSSTPVRNKRGVFVLGFLGFLATAGSAMGARSLTLSAQSRTLLAGIVQQQQQLLDVVKRQQEMLRLTVWGTKNLQARVTAIEKYLKHQAQLNSWGCAFRQVCHTTVPWVNDSLSPDWKNMTWQEWEKQVRYLEANISQSLEEAQIQQEKNMYELQKLNSWDILGNWFDLTSWVKYIQYGVHIVVGIIALRIAIYVVQLLSRFRKGYRPVFSSPPGYLQQIHIHKDRGQPANEGTEEDVGGDSGYDLWPWPINYVQFLIHLLTRLLIGLYNICRDLLSKNSPTRRLISQSLTAIRDWLRLKAAQLQYGCEWIQEAFQAFARTTRETLAGAWGWLWEAARRIGRGILAVPRRIRQGAELALL

SEQ ID NO: 36 - protein, 257 aa, Human immunodeficiency virus type 2
MGASGSKKLSKHSRGLRERLLRARGDGYGKQRDASGGEYSQFQEESGREQNSPSCEGQQYQQGEYMNSPWRNPATERQKDLYRQQNMDDVDSDDDDLIGVPVTPRVPRREMTYKLAIDMSHFIKEKGGLQGMFYSRRRHRILDIYLEKEEGIIPDWQNYTHGPGVRYPMYFGWLWKLVSVELSQEAEEDEANCLVHPAQTSRHDDEHGETLVWQFDSMLAYNYKAFTLYPEEFGHKSGLPEKEWKAKLKARGIPYSE

1. A method for treatment or prevention of HIV, comprising infection of a subject in need thereof with at least one recombinant HCMV vector comprising an expressible HIV antigen or a variant or fusion protein thereof.

2. The method of claim 1, wherein infection is of an immunocompetent, HCMV seropositive subject.

3. The method of claim 1, wherein the at least one HIV antigen is selected from the group consisting of gag, pol, env, nef, rev, tat, vif, vpr, vpu, and antigenic portions, variants and fusion proteins thereof.

4. The method of claim 1, further comprising serial re-infection with at least one recombinant HCMV vector comprising an expressible HIV antigen or a variant or fusion protein thereof.

5. The method of claim 4, wherein the expressible HIV antigen, or variant or fusion protein thereof, of the serial re-infection vector is different than that of the initial infection vector.

6. The method of claim 1, wherein expression is driven by an antigen encoding sequence in operable association with a promoter selected from the group consisting of a constitutive CMV promoter, an immediate early CMV promoter, an early CMV promoter and a late CMV promoter.

7. The method of claim 6, wherein the promoter is selected from the group consisting of EF1-alpha, MIE, pp65 and gH.

8. A method for treatment or prevention of SIV, comprising infection of a subject in need thereof with at least one recombinant RhCMV vector comprising an expressible SIV antigen or a variant or fusion protein thereof.

9. The method of claim 8, wherein infection is of an immunocompetent, RhCMV seropositive subject.

10. The method of claim 8, wherein the at least one SIV antigen is selected from the group consisting of gag, pol, env, nef, rev, tat, vif, vpx, and antigenic portions, variants and fusion proteins thereof.

11. The method of claim 8, further comprising serial re-infection with at least one recombinant RhCMV vector comprising an expressible SIV antigen or a variant or fusion protein thereof.

12. The method of claim 11, wherein the expressible SIV antigen, or variant or fusion protein thereof, of the serial re-infection vector is different than that of the initial infection vector.

13. The method of claim 8, wherein expression is driven by an antigen encoding sequence in operable association with a promoter selected from the group consisting of a constitutive CMV promoter, an immediate early CMV promoter, an early CMV promoter and a late CMV promoter.

14. The method of claim 13 wherein the promoter is selected from the group consisting of EF1-alpha, MIE, pp65 and gH.

15. A recombinant HCMV vaccine vector, comprising an expressible HIV antigen or a variant or fusion protein thereof.

16. The recombinant vector of claim 15, comprising suicide means.

17. The recombinant vector of claim 15, wherein expression is driven by an antigen encoding sequence in operable association with a promoter selected from the group consisting of a constitutive CMV promoter, an immediate early CMV promoter, an early CMV promoter and a late CMV promoter.

18. The recombinant vector of claim 17, wherein the promoter is selected from the group consisting of EF1-alpha, MIE, pp65 and gH.

19. A recombinant RhCMV vaccine vector, comprising an expressible SIV antigen or a variant or fusion protein thereof.

20. The recombinant vector of claim 19, comprising suicide means.

21. The recombinant vector of claim 19, wherein expression is driven by an antigen encoding sequence in operable association with a promoter selected from the group consisting of a constitutive CMV promoter, an immediate early CMV promoter, an early CMV promoter and a late CMV promoter.

22. The recombinant vector of claim 21, wherein the promoter is selected from the group consisting of EF1-alpha, MIE, pp65 and gH.

23. A pharmaceutical composition, comprising, along with a pharmaceutically acceptable carrier or excipient, a recombinant HCMV comprising an expressible HIV antigen or a variant or fusion protein thereof.

24. The pharmaceutical composition of claim 23, wherein the recombinant HCMV vaccine vector comprises suicide means.

25. A pharmaceutical composition, comprising, along with a pharmaceutically acceptable carrier or excipient, a recombinant RhCMV comprising an expressible SIV antigen or a variant or fusion protein thereof.

26. The pharmaceutical composition of claim 25, wherein the recombinant RhCMV vaccine vector comprises suicide means.

27. A method for treatment or prevention of TB, comprising infection of a subject in need thereof with at least one recombinant HCMV vector comprising an expressible TB antigen or a variant or fusion protein thereof.

28. The method of claim 27, wherein infection is of an immunocompetent, TB seropositive subject.

29. The method of claim 27, wherein the at least one TB antigen is selected from the group consisting of ESAT-6, Ag85A, AG85B, MPT51, MPT64, CFP10, TB10.4, Mtb8.4, hspX, CFP6, Mtb12, Mtb9.9 antigens, Mtb32A, PstS-1, PstS-2, PstS-3, MPT63, Mtb39, Mtb41, MPT83, 71-kDa, PPE 68, LppX, and antigenic portions, variants and fusion proteins thereof.

30. The method of claim 27, further comprising serial re-infection with at least one recombinant HCMV vector comprising an expressible TB antigen or a variant or fusion protein thereof.

31. The method of claim 30, wherein the expressible TB antigen, or variant or fusion protein thereof, of the serial re-infection vector is different than that of the initial infection vector.

32. The method of claim 27, wherein expression is driven by an antigen encoding sequence in operable association with a promoter selected from the group consisting of a constitutive CMV promoter, an immediate early CMV promoter, an early CMV promoter and a late CMV promoter.

33. The method of claim 32, wherein the promoter is selected from the group consisting of EF1-alpha, MIE, pp65 and gH.

34. A recombinant HCMV vaccine vector, comprising an expressible TB antigen or a variant or fusion protein thereof.

35. The recombinant vector of claim 34, comprising suicide means.

36. The recombinant vector of claim 34, wherein expression is driven by an antigen encoding sequence in operable association with a promoter selected from the group consisting of a constitutive CMV promoter, an immediate early CMV promoter, an early CMV promoter and a late CMV promoter.

37. The recombinant vector of claim 36, wherein the promoter is selected from the group consisting of EF1-alpha, MIE, pp65 and gH.

38. A pharmaceutical composition, comprising, along with a pharmaceutically acceptable carrier or excipient, a recombinant HCMV comprising an expressible TB antigen or a variant or fusion protein thereof.

39. The pharmaceutical composition of claim 38, wherein the recombinant HCMV vaccine vector comprises suicide means.
